(19) United States
(12) Patent Application Publication
(10) Pub. No.: US 2024/0287605 A1
(43) Pub. Date: Aug. 29, 2024

(54) EPIGENETIC CLOCKS

(71) Applicant: The Regents of the University of California, Oakland, CA (US)

(72) Inventor: Stefan Horvath, Los Angeles, CA (US)

(73) Assignee: The Regents of the University of California, Oakland, CA (US)

(21) Appl. No.: 18/572,130

(22) PCT Filed: Jun. 24, 2022
(86) PCT No.: PCT/US22/34978

§ 371 Date: Dec. 19, 2023

Related U.S. Application Data
(60) Provisional application No. 63/215,289, filed on Jun. 25, 2021.

(51) Int. Cl. C12Q 1/6876

(52) U.S. Cl. CPC C12Q 1/6876; C12Q 2600/154

(57) ABSTRACT

DNA methylation profiles have been used to develop biomarkers of aging known as epigenetic clocks, which predict chronological age with remarkable accuracy and show promise for inferring health status as an indicator of biological age. Epigenetic clocks were first built to monitor human aging but the principles underpinning them appear to be evolutionarily conserved. Here we describe reliable and highly accurate epigenetic clocks shown to apply to humans and other mammals.

### CROSS-REFERENCE TO RELATED APPLICATIONS

[0001] This application claims the benefit under 35 U.S.C. Section 119(e) of co-pending and commonly-assigned U.S. Provisional Patent Application Ser. No. 63/215,289, filed on Jun. 25, 2021, and entitled “EPIGENETIC CLOCKS” which application is incorporated by reference herein.

### TECHNICAL FIELD

[0002] The invention relates to methods and materials for examining biological aging in mammals.

### BACKGROUND OF THE INVENTION

[0003] Studies in invertebrates (yeast, worm, flies) have led to a long list of pharmacological agents that promise to intervene in different aspects of the aging process including stress response mimetics, anti-inflammatory interventions, epigenetic modifiers, neuroprotective agents, hormone treatments. While our arsenal of potential anti-aging interventions is brimming with highly promising candidates that delay aging in model organisms, it remains to be seen whether these interventions delay aging in human and other mammalian cells. To facilitate effective in vitro and ex vivo studies, there is a need for biomarkers of aging. One potential biomarker that has gained significant interest in recent years is DNA methylation (DNAm). DNA methylation by the attachment of a methyl group to cytosines is one of the most widely studies epigenetic modifications, due to its implications in regulating gene expression across many biological processes. Chronological time has been shown to elicit predictable hypo- and hyper-methylation changes at many regions across the genome and several DNAm based biomarkers of aging have been developed. These epigenetic age estimators exhibit statistically significant associations with many age-related diseases and conditions.

[0004] In humans. DNA methylation levels can be used to accurately predict an individual's age, as well as age across tissues and cell types. DNA methylation-based biomarkers allow one to estimate the epigenetic age of an individual. For example, the pan tissue epigenetic clock, which is based on 353 dinucleotide markers, known as CpGs (-C-phosphate-G-), can be used to estimate the age of most human cell types, tissues, and organs (Horvath S. DNA methylation age of human tissues and cell types. Genome Biol. 2013; 14 (R115). The estimated age, referred to as “DNA methylation age” (DNAm age), correlates with chronological age when methylation is assessed in certain cell types, tissues, and organs.

[0005] The first human methylation chip (ILLUMINA INFINIUM 27K) was introduced over ten years ago. However, there are few platforms that focus on specific aspects of human aging and/or aging in non-human mammalian species. In view of this, there is a need for methods and materials useful for observing specific methylation profiles and associated phenomena that relate to aspects of aging in both humans and other mammalian species.

### SUMMARY OF THE INVENTION

[0006] The invention disclosed herein provides methods and materials designed to observe DNA methylation levels at selected sites within genomes of humans and other mammalian species. Using these methods and materials, embodiments of the invention provide a number of different biomarkers useful both for predicting the lifespan of humans and a number of other mammals, as well as assessing other physiological factors associated with aging. As discussed in detail below, embodiments of the invention observe methylation levels at a variety of selected sites within genomes of humans and other mammalian species in order to obtain information on a variety of physiological phenomena associated with aging such as life expectancy, mortality, and morbidity. Embodiments of the invention that focus on the prediction of mortality and morbidity in humans show that these DNAm based biomarkers are highly informative for a range of applications.

[0007] As discussed below, embodiments of the invention include methods for generating predictors of age-related phenomena in mammals, for example age and lifespan. In particular, it has been discovered that a number of CpG methylation sites in mammalian genomes are conserved across mammalian species & tissues. Building upon these discoveries, a number of methods that combine high accuracy age prediction with maximal biological and translational relevance have been developed. Embodiments of the invention can be used, for example, as predictors of “chronological age” or “epigenetic age” in various mammals. Embodiments of the invention also include methods for monitoring and tracking how aging process changes methylation patterns associated with the epigenetic aging of human and other mammalian cells under a wide variety of conditions. For example, embodiments of the invention include in vitro and in vivo methods for observing and monitoring the effects of one or more test agents or treatments on genomic methylation patterns associated with the epigenetic aging of human and other mammalian cells. In one illustrative example of such methods, an embodiment of the invention uses observations of changes in the disclosed methylation profiles that associated with of “epigenetic age” before and after exposure to an agent or other environmental condition that may modulate such age-related methylation profiles.

[0008] As shown in the examples, the DNA methylation profiles disclosed herein that are predictors of “actual/chronological age” and/or “epigenetic age” are accurate for multiple mammalian species. In this context, embodiments of the invention can be applied to individual species or groups of species for increased accuracy. Such embodiments of the invention include pan-tissue epigenetic clocks for humans and dogs and/or rats and/or mice. In certain embodiments of the invention, DNA is obtained from specific species, groups of species, tissues or groups of tissues (e.g., blood) for increased accuracy. In addition, embodiments of the invention are applied to specific species relationships for increased translational relevance (e.g., dogs and humans, rat and humans, mice and humans). Moreover, embodiments of the invention are designed to be applied to other complex age-related traits including predicted lifespan, maximum lifespan across species, average to time to death and the like.

[0009] The invention disclosed herein has a number of embodiments. Embodiments of the invention include, for example, methods for obtaining information associated with an age of a mammal, the method comprising: obtaining genomic DNA from the mammal; observing CpG methylation of the genomic DNA in a group of at least 40 methylation markers present in genomic polynucleotides having SEQ ID NO: 1-SEQ ID NO: 3880; and then correlating methylation observed in the methylation markers with an age of the mammal; so that information associated with an age of the mammal is obtained. In some embodiments of the invention, methylation of the genomic DNA is observed in a plurality of methylation markers present in in polynucleotides having SEQ ID NO: 1-SEQ ID NO: 956 such that the methylation markers observed are selected to be methylation markers whose methylation status is associated with an age in both humans and dogs. In some embodiments of the invention, methylation of the genomic DNA is observed in a plurality of methylation markers present in in polynucleotides having SEQ ID NO: 2220-SEQ ID NO: 3043 such that methylation markers observed are selected to be methylation markers whose methylation status is associated with an age in both humans and rats. In some embodiment of the invention, methylation of the genomic DNA is observed in a plurality of methylation markers present in in polynucleotides having SEQ ID NO: 1222-SEQ ID NO: 2219 such that methylation markers observed are selected to be methylation markers whose methylation status is associated with an age in both humans and mice. In some embodiments of the invention, methylation of the genomic DNA is observed in a plurality of methylation markers present in in polynucleotides having SEQ ID NO: 3044-SEQ ID NO: 3880 such that methylation markers observed are selected to be methylation markers whose methylation status is associated with an age in a plurality of mammalian species.

[0010] Certain embodiments comprise correlating methylation observed in the methylation markers with an epigenetic age and/or a chronological age of the mammal. In some embodiments of the invention, the method further compares an epigenetic age obtained for the sample with the chronological age of the mammal. Optionally, the method comprises determining an epigenetic age of the biological sample with a statistical prediction algorithm, comprising (a) obtaining a linear combination of the methylation marker levels, and (b) applying a transformation to the linear combination to determine an epigenetic age of the biological sample. In some embodiments of the invention, methylation is observed by a process comprising treatment of genomic DNA from the population of cells from the individual with bisulfite to transform unmethylated cytosines of CpG dinucleotides in the genomic DNA to uracil; and/or genomic DNA is obtained from fibroblasts, keratinocytes, buccal cells, endothelial cells, lymphoblastoid cells, and/or cells obtained from blood, skin, dermis, epidermis or saliva; and/or genomic DNA is hybridized to a complimentary sequence disposed on a microarray; and/or correlating observed methylation in the methylation markers comprises a regression analysis.

[0011] Embodiments of the invention also include methods for observing the effects of an environmental condition on genomic methylation associated epigenetic aging of mammalian cells, the methods comprising: (a) exposing mammalian cells to the environmental condition; (b) observing methylation status in at least 40 of the methylation markers present in polynucleotides having SEQ ID NO: 1-SEQ ID NO: 3880 in genomic DNA from the mammalian cells; and then (c) comparing the observations from (b) with observations of a methylation status at least 40 of the methylation markers present in in polynucleotides having SEQ ID NO: 1-SEQ ID NO: 3880 in genomic DNA from control mammalian cells not exposed to the environmental condition such that effects of the environmental condition on genomic methylation associated epigenetic aging in the mammalian cells is observed. In some embodiments of the invention, the plurality of the methylation markers observed are selected to be methylation markers whose methylation status is associated with age in both humans and dogs; and/or the cells are human and/or dog cells. In some embodiments of the invention, the plurality of the methylation markers observed are selected to be methylation markers whose methylation status is associated with age in both humans and rats; and/or the cells are human and/or rat cells. In some embodiments of the invention, the plurality of the methylation markers observed are selected to be methylation markers whose methylation status is associated with age in both humans and mice; and/or the cells are human and/or mouse cells. In some embodiments of the invention, a plurality of the methylation markers observed are selected to be methylation markers whose methylation status is associated with an age in a plurality of mammalian species and the cells are human cells.

[0012] In certain embodiments of the methods for observing the effects of an environmental condition on genomic methylation associated epigenetic aging of mammalian cells, methylation is observed by a process comprising treatment of genomic DNA from the population of cells from the individual with bisulfite to transform unmethylated cytosines of CpG dinucleotides in the genomic DNA to uracil; and/or genomic DNA is obtained from fibroblasts, keratinocytes, buccal cells, endothelial cells, lymphoblastoid cells, and/or cells obtained from blood, skin, dermis, epidermis or saliva; and/or genomic DNA is hybridized to a complimentary sequence disposed on a microarray; and/or correlating observed methylation in the methylation markers comprises a regression analysis. In some embodiments of the invention, the environmental condition comprises exposure to a composition of matter. In certain of these embodiments of the invention, the composition of matter is combined with mammalian cells for at least 1 day, at least 1 week or at least 1 month. Optionally, the composition of matter comprises a test agent having a molecular weight of <900 Da.

[0013] Embodiments of the invention further include a tangible computer-readable medium comprising computer-readable code that, when executed by a computer, causes the computer to perform operations comprising receiving information corresponding to a methylation status of a set of methylation markers in a biological sample, said methylation markers comprising methylation markers present in genomic polynucleotides having SEQ ID NO: 1-SEQ ID NO: 3880; and then determining an age of the biological sample by applying a statistical prediction algorithm to the measured methylation marker levels. Typically, the tangible computer-readable medium further comprises a computer-readable code that, when executed by a computer, causes the computer to perform one or more additional operations comprising: sending information corresponding to the methylation levels of the set of methylation markers in the biological sample to a tangible data storage device.

[0014] Other objects, features and advantages of the present invention will become apparent to those skilled in the art from the following detailed description. It is to be understood, however, that the detailed description and specific examples, while indicating some embodiments of the present invention, are given by way of illustration and not limitation. Many changes and modifications within the scope of the present invention may be made without departing from the spirit thereof, and the invention includes all such modifications.

### BRIEF DESCRIPTION OF THE DRAWINGS

[0015] FIG. 1A-1J: Data from cross-validation studies of epigenetic clocks for dogs. To arrive at unbiased estimates of the dog epigenetic clock we carried out two types of validation studies: FIG. 1(a) leave one out (LOO) cross validation and, FIG. 1(b) leave-one-breed-out cross validation (LOBO). FIG. 1(c, d) performance of the dog clock in FIG. 1(c) different human tissues and FIG. 1(d) human blood tissue. FIGS. 1(e,f,g,h) Species balanced cross validation (LOFO10Balance) analysis of human dog clocks for FIGS. 1(e,f) chronological age and FIGS. 1(g,h) relative age. Human dog clock for chronological age applied to FIG. 1(e) both species and FIG. 1(f) dogs only. Human dog clock for relative age applied to FIG. 1(g) both species, FIG. 1(h) dogs only. FIGS. 1(i,j) LOBO cross validation of the human dog clock for FIG. 1(i) chronological age and FIG. 1(j) relative age in blood samples from dogs. Species balanced cross validation (LOFO10Balance) was implemented in the following steps. First, we partitioned both the combined human/dog dataset into 10 evenly sized folds, where each fold has the same proportion and human and dog samples (referred to as “balanced” folds). We then iterate through each fold, training on the other nine folds, and applied the model to the target fold. Each panel reports the sample size, correlation coefficient, median absolute error (MAE).

[0016] FIGS. 2A-2F. Epigenetic clocks for prediction average time to death. FIG. 2(a) Leave-one-breed-out (LOBO) estimates of DNA methylation (DNAm) average time to death (y-axis, in units of years) versus average time to death (x-axis in units of years). For each dog, the average time to death was defined as difference between the upper limit of the respective breed lifespan (Lifespan.HighClubBreeder) and chronological age. FIG. 2(b) LOBO DNAm average time to death adjusted for age (y-axis) versus lifespan (x-axis, in units of year). FIG. 2(c) LOBO DNAm average time to death adjusted for age (y-axis) versus adult weight (x-axis). FIG. 2(d) LOBO DNAm average time to death (y-axis) versus chronological age (x-axis). The association between LOBO DNAm average time to death adjusted for age and the lifespan remains significant (p=4.4×10-3) even after adjusting for average adult weight in a multivariate regression model. FIG. 2(e) Phylogenetically Independent (Indep.) contrast (PIC) generated LOBO DNAm average time to death adjusted for age (y-axis, at breed level) versus PIC generated lifespan (x-axis, at breed level). FIG. 2(f) PIC generated LOBO DNAm average time to death adjusted for age (y-axis, at breed level) versus PIC generated adult weight (x-axis, at breed level). At each panel, we report Pearson correlation estimate. Each individual dog was marked in breed index as listed in the legend of FIG. 1.

[0017] FIGS. 3A-3F. Epigenome wide association analysis of chronological age, average breed lifespan, and average breed weight of dog blood. FIG. 3(a) Manhattan plots of the EWAS results. Coordinates are estimated based on the alignment of the mammalian array probes to the CanFam_GreatDane.UMICH_Zoey_3.1.100 genome assembly. The direction of associations with p<10-3 (red dotted line) is highlighted by red (hypermethylated) and blue (hypomethylated) colors. Top 15 CpGs was labeled by the neighboring genes. FIG. 3(b) Location of top CpGs in each tissue relative to the closest transcriptional start site. The grey color in the last panel represents the location of 31,911 on the mammalian array that mapped to the genome of the Great Dane. Top CpGs were selected at p<10-3. For age, top 1,000 CpGs were selected positive or negative direction. The number of selected CpGs: Age, 1,000; lifespan; 162; weight, 406. FIG. 3(c) Boxplot of DNAm aging in CpGs located in island or outside. Labels indicate neighboring genes of the top four CpGs in each analysis. ***p<10-4. FIG. 3(d) Venn diagram showing the overlap of top CpGs associated with chronological age, breed lifespan, and breed weight. The (+) and (−) signs in the table show the direction of association with each variable. FIG. 3(c) Sector plot of EWAS of dog breed lifespan and weight. Red dotted line: p<10-3; blue dotted line: p>0.05; Red dots: shared CpGs; black dots: lifespan- or weight-specific changes. FIG. 3(f) Enrichment analysis EWAS-GWAS associated genes. The heat map represents the significant results from the genomic-region based enrichment analysis between (1) the top 5% genomic regions involve in GWAS of complex traits-associated genes and (2) up to the top 1,000 hypermethylated/hypomethylated CpGs from EWAS of lifespan, adult weight, lifespan adjusted adult weight at breed level, and age at individual dog level, respectively. Cells are colored in grey if nominal P>0.05. The heat map color gradient is based on −log 10 (hypergeometric P value). We list the GWAS study (x-axis) if that at least one enrichment P value (columns) is significant at a nominal significance level of 3.0×10-3. The v-axis lists GWAS index number, trait name. The color band next to the trait encodes the GWAS category. Abbreviations: All=All ancestries, WHR=waist to hip ratio, EUR=European ancestry, FrD=frontal temporal dementia.

[0018] FIGS. 4A-4B. Genes having both genetic variants and methylation patterns that relate to dog breed weight or lifespan. Scatter plots of DNAm changes with strong correlation with lifespan FIG. 4(a), or adult weight FIG. 4(b) in genes selected by GWAS of weight in dog breeds 3, 16. The title of each panel reports the CpG and an adjacent gene. The blue text inside the panel reports the Pearson correlation coefficient and the p value.

[0019] FIGS. 5A-5H. Cross-validation studies of epigenetic clocks for rat. FIGS. 5(A-D) Four epigenetic clocks that were trained on rat tissues only. FIGS. 5(E-H) Results for 2 clocks that were trained on both human and rat tissues. Leave-one-sample-out estimate of DNA methylation age (y-axis, in units of years) versus chronological age for FIG. 5(A) Rat pan-tissue, FIG. 5(B) Rat brain, FIG. 5(C) Rat blood, and FIG. 5(D) Rat liver clock. Dots are colored by FIG. 5(A) tissue type or FIG. 5(B) brain region. FIG. 5(E) and FIG. 5(F) “Human-rat” clock estimate of absolute age. FIGS. 5(G. H) Human-rat clock estimate of relative age, which is the ratio of chronological age to maximum lifespan in the respective species. Ten-fold cross-validation estimates of age (y-axis, in years) in FIGS. 5(E, G) Human (green) and rat (orange) samples and FIGS. 5(F, H) rat samples only (colored by tissue type). Each panel reports the sample size, correlation coefficient, median absolute error (MAE).

[0020] FIGS. 6A-6G. Meta-analysis of chronological age across species and tissues. FIG. 6(a), Meta-analysis p-value (−log base 10 transformed) versus chromosomal location (x-axis) according to human genome assembly 38 (Hg38). The upper and lower panels of the Manhattan plot depict CpGs that gain/lose methylation with age. CpGs colored in red and blue exhibit highly significant (P<10-200) positive and negative age correlations, respectively. The most significant CpG (cg12841266, P=9.3×10-913) is located in exon 2 of the LHFPL4 gene in humans and most other mammalian species, followed by cg11084334 (P=1.3×10-827). These two CpGs and cg097720 (P=4.3×10-725) located in the paralog gene LHFPL3 are marked in purple diamond points. Scatter plots of cg12841266 (in x-axis) versus chronological age in FIG. 6(b), mini pigs (Sus scrofa minusculus), FIG. 6(c), Oldfield mouse (Peromyscus polionotus), and FIG. 6(d), vervet monkey (Chlorocebus aethiops sabacus), respectively. Tissue samples are labelled by the mammalian species index and colored by tissue type. Panels e-g: annotations of the top 1000 hypermethylated and hypomethylated CpGs listed in the EWAS meta-analysis across all (results in panel a), brain, blood, liver, and skin tissues, respectively. FIG. 6(e), the Venn diagram displays the overlap of age-associated CpGs across different organs, based on EWAS of the top 1000 hypermethylated/hypomethylated CpGs. We list all 36 genes that are proximal to the 54 age-associated CpGs common across all organs in the Venn diagram. FIG. 6(f), the bar plots depicts the associations of the EWAS results (meta Z scores) with CpG islands (inside/outside) in different tissue types. We list top genes for each bar. FIG. 6(g), Selected results from GREAT enrichment analysis. The color gradient is based on −log 10 (hypergeometric P value). The size of the points reflects the number of common genes.

[0021] FIGS. 7A-7F. Naïve universal clock for log-transformed age. FIG. 7(a, b), Chronological age (x-axis) versus DNAmAge estimated using a, leave-one-fraction-out (LOFO) b, leave-one-species-out (LOSO) analysis. The grey and black dashed lines correspond to the diagonal line (y=x) and the regression line, respectively. Each dot (tissue sample) is labelled by the mammalian species index (legend). The species index corresponds to the phylogenetic order, e.g. 1=primates, 2=elephants (Proboscidea), 3=cetaceans etc. The number after the decimal point denotes the individual species within the phylogenetic order. Points are colored according to designated tissue color. The heading of each panel reports the Pearson correlation (cor) across all samples. The med.Cor (or med.MAE) is the median across species that contain 15 or more samples. FIG. 7(c-f), Delta age denotes the difference between the LOSO estimate of DNAm age and chronological age. The scatter plots depict mean delta age per species (y-axis) versus FIG. 7(c), maximum lifespan observed in the species, FIG. 7(d), average age at sexual maturity FIG. 7(e), gestational time (in units of years), and FIG. 7(f), (log-transformed) average adult weight in units of grams.

[0022] FIGS. 8A-8L. Universal clocks for transformed age across mammals. The figure displays universal clock 2 (Clock 2) estimates of relative age, universal clock 3 (Clock 3) estimates of log-linear transformation of age and marsupial clock (Marsupial Clock) estimates of relative age of eutherian and marsupial samples respectively. Relative age estimation incorporates maximum lifespan and gestational age, and assumes values between 0 and 1. Log-linear age is formulated with age at sexual maturity and gestational time. The DNAm estimates of age (y axes) of FIGS. 8(a) and (b) are transformation of relative age (Clock 2 and Marsupial Clock) or log-linear age (Clock 3), into units of years. FIG. 8(a-f), Age estimated via leave-one-fraction-out (LOFO) cross-validation for Clock 2 in FIG. 8(a,d), Clock 3 in FIG. 8(b,e) and Marsupial Clock in FIG. 8(c,f). FIG. 8(g-i), Age estimated via LOFO cross-validation in Clock 2. FIG. 8(j-l), age estimated via leave-one-species-out (LOSO) cross-validation for Clock 2. We report Pearson correlation coefficient estimates. Median correlation (med.Cor) and median of median absolute error (med.MAE) are calculated across species in FIG. 8(a-f) or across species-tissue in FIG. 8(g-i). Each sample is labelled by mammalian species index and marked by tissue color (FIG. 7).

[0023] FIGS. 9A-9P. Universal clock for relative age applied to specific tissues. The specific tissue or cell type is reported in the title of each panel. DNA methylation based estimates of relative age (y-axis) versus actual relative age (x-axis). Each dot presents a tissue sample colored by tissue and labelled by mammalian species index. The analysis is restricted to tissues with at least 15 samples available. Leave-one-folder-out cross-validation (LOFO) was used to arrive at unbiased estimates of predictive accuracy measures: median absolute error (MAE) and age correlation based on relative age. “Cor” denotes the Pearson correlation coefficient based on all available samples. “med.Cor” denotes the median values across all species for which at least 15 samples were available. Title is marked in blue if a tissue type was collected from a single species.

[0024] FIGS. 10A-10D. Human-mouse epigenetic clock. DNA methylation estimates of FIG. 10(a) relative age and FIG. 10(b) chronological age in samples from mice and humans. The y-axis reports cross validation estimates of the DNAm based age estimator. The x-axis reports the actual values. Points are labelled by species number (9.1=mouse and 1.1=human) and colored by tissue/cell type. Analysis restricted to FIG. 10(c) human samples and FIG. 10(d) mouse samples. Each panel reports the Pearson correlation and the median absolute error (MAE) and median values across different tissue types. We analyzed N=1982 mouse tissues and N=1211 human tissues.

### DETAILED DESCRIPTION OF THE INVENTION

[0025] In the description of embodiments, reference may be made to the accompanying figures which form a part hereof, and in which is shown by way of illustration a specific embodiment in which the invention may be practiced. It is to be understood that other embodiments may be utilized, and structural changes may be made without departing from the scope of the present invention. Many of the techniques and procedures described or referenced herein are well understood and commonly employed by those skilled in the art. Unless otherwise defined, all terms of art, notations and other scientific terms or terminology used herein are intended to have the meanings commonly understood by those of skill in the art to which this invention pertains. In some cases, terms with commonly understood meanings are defined herein for clarity and/or for ready reference, and the inclusion of such definitions herein should not necessarily be construed to represent a substantial difference over what is generally understood in the art.

[0026] All publications mentioned herein are incorporated herein by reference to disclose and describe aspects, methods and/or materials in connection with the cited publications. For example, Lu et al., Aging (Albany NY). 2019 Jan. 21; 11(2):303-327. doi: 10.18632/aging 101684; PCT Patent Application No.: PCT/US2019/034829, U.S. Patent Publication 20150259742, U.S. patent application Ser. No. 15/025,185, titled “METHOD TO ESTIMATE THE AGE OF TISSUES AND CELL TYPES BASED ON EPIGENETIC MARKERS”, filed by Stefan Horvath; U.S. patent application Ser. No. 14/119,145, titled “METHOD TO ESTIMATE AGE OF INDIVIDUAL BASED ON EPIGENETIC MARKERS IN BIOLOGICAL SAMPLE”, filed by Eric Villain et al.; and Hannum et al. “Genome-Wide Methylation Profiles Reveal Quantitative Views Of Human Aging Rates.” Molecular Cell. 2013; 49(2):359-367 and patent US2015/0259742, are incorporated by reference in their entirety herein.

[0027] The invention disclosed herein provides novel and powerful biomarker predictors of physiological factors such as chronological age, relative age, life expectancy, mortality, and morbidity based on DNA methylation levels. Our discoveries surrounding the prediction of mortality and morbidity show that the DNAm based biomarkers disclosed herein are highly robust and informative for a range of applications. Embodiments of the DNAm based biomarkers disclosed herein can provide complementary information that enhances and supplements traditional biomarker assessments that are widely used in clinical applications. For example, embodiments of the invention can be used to directly predict/prognosticate mortality, and further information relating to a host of age-related conditions such as cardiovascular disease, cancer risk, progression in neurodegeneration, and various measures of frailty.

[0028] Embodiments of the invention include a number of different biomarker “clocks” useful for observing physiological factors such as chronological age, epigenetic age, relative age, life expectancy, mortality, and morbidity based on DNA methylation levels/profiles. The term “chronological age” refers to the actual age (e.g., in years) of the individual from whom a sample is obtained. The term “epigenetic age” is the age you are biologically. In this context, “epigenetic age” simply refers to the apparent “age” of an individual resulting from the interaction of its genotype with the environment of the individual from whom a sample is obtained. In this way and unlike chronological age, epigenetic age considers environmental factors that modulate human aging (e.g. environmental factors that can make folks “old before their time”). For example, by calendar years, you may have a chronological age of 50 years old, but your epigenetic age might be ten years, or any number of years, younger or older.

[0029] Embodiments of the invention are directed to methods of obtaining information on—factors associated with aging in mammals. In certain embodiments of the invention, these methods comprise the steps of: obtaining genomic DNA from the mammal; observing methylation of the genomic DNA in a group of at least 40 methylation markers found in a plurality of methylation markers present in in polynucleotides having SEQ ID NO: 1-SEQ ID NO: 3880; and then correlating observed methylation in the methylation markers with an age of a mammal (e.g. chronological age, epigenetic age and the like) such that information on factors associated with aging in mammals is obtained.

[0030] In certain embodiments of the invention, a plurality of the methylation markers observed are selected to be methylation markers whose methylation status is associated with a chronological and/or epigenetic age in both humans and dogs; and/or the methods are used to obtain information on factors associated with an age of a mammal such as a predication of chronological age, relative/epigenetic age or average time-to-death in humans and/or dogs. In certain embodiments of the invention; a plurality of the methylation markers observed are selected to be methylation markers whose methylation status is associated with a chronological and/or epigenetic age in both humans and rats; and/or a physiological factor associated with an age of a mammal comprises a predication of: chronological age or relative age or average time-to-death in humans and/or rats. In certain embodiments of the invention, a plurality of the methylation markers observed are selected to be methylation markers whose methylation status is associated with age in both humans and mice; and/or a physiological factor associated with an age of a mammal comprises a predication of: chronological age or relative age or average time-to-death in humans and/or mice.

[0031] In certain embodiments of the invention, methylation of the genomic DNA is observed in a plurality of the methylation markers selected to be methylation markers whose methylation status is universally associated with age in mammals; and/or a physiological factor associated with an age of a mammal comprises a predication of: chronological age or relative age or average time-to-death in mammals. In certain embodiments of the invention, a plurality of the methylation markers observed are selected to be methylation markers whose methylation status is associated with maximum lifespan in in humans and other mammals; and/or a physiological factor associated with an age of a mammal comprises a predication of: maximum lifespan in humans and other mammals.

[0032] Typically in the above-noted methods, methylation is observed by a process comprising treatment of genomic DNA from the population of cells from the individual with bisulfite to transform unmethylated cytosines of CpG dinucleotides in the genomic DNA to uracil; genomic DNA is obtained from fibroblasts, keratinocytes, buccal cells, endothelial cells, lymphoblastoid cells, and/or cells obtained from blood, skin, dermis, epidermis or saliva; genomic DNA is hybridized to a complimentary sequence disposed on a microarray; and/or correlating observed methylation in the methylation markers comprises a regression analysis.

[0033] Embodiments of the invention also include methods for observing the effects of an environmental condition on genomic methylation associated epigenetic aging of mammalian cells, the methods comprising: (a) exposing mammalian cells to the environmental condition; (b) observing methylation status in at least 40 of the methylation markers present in polynucleotides having SEQ ID NO: 1-SEQ ID NO: 3880 in genomic DNA from the mammalian cells; and then (c) comparing the observations from (b) with observations of a methylation status at least 40 of the methylation markers present in in polynucleotides having SEQ ID NO: 1-SEQ ID NO: 3880 in genomic DNA from control mammalian cells not exposed to the environmental condition such that effects of the environmental condition on genomic methylation associated epigenetic aging in the mammalian cells is observed. In some embodiments of the invention, the plurality of the methylation markers observed are selected to be methylation markers whose methylation status is associated with age in both humans and dogs; and/or the cells are human and/or dog cells. In some embodiments of the invention, the plurality of the methylation markers observed are selected to be methylation markers whose methylation status is associated with age in both humans and rats; and/or the cells are human and/or rat cells. In some embodiments of the invention, the plurality of the methylation markers observed are selected to be methylation markers whose methylation status is associated with age in both humans and mice; and/or the cells are human and/or mouse cells. In some embodiments of the invention, a plurality of the methylation markers observed are selected to be methylation markers whose methylation status is associated with an age in a plurality of mammalian species and the cells are human cells.

[0034] Certain embodiments of the invention include methods of observing the effects of one or more test agents on genomic methylation associated epigenetic aging of human and/or dog, rat or mouse cells both in vitro and in vivo. Typically, these methods comprise combining the test agent(s) with the cells (e.g. for specified period of time such as at least 1-7 days, 1-3 weeks, 1-6 months or the like), and then observing methylation status in at least at least 40 of the methylation markers disclosed herein in genomic DNA from the cells, and then comparing the observations from (b) with observations of the methylation status in at least at least 40 of the methylation markers disclosed herein in genomic DNA from control cells not exposed to the test agent such that effects of the test agent on genomic methylation associated epigenetic aging in the cells is observed. Optionally in these methods, a plurality of test agents are combined with the mammalian cells in vitro. In illustrative embodiments of the invention, the test agent is a polypeptide, a polynucleotide or a compound having a molecular weight less than 3,000, 2,000, 1,000 or 500 g/mol.

[0035] In certain embodiments of the methods of observing the effects of one or more test agents on genomic methylation associated epigenetic aging, the plurality of the methylation markers observed are selected to be methylation markers whose methylation status is associated with age in both humans and dogs; and/or the cells are human and/or dog cells. In certain embodiments, the plurality of the methylation markers observed are selected to be methylation markers whose methylation status is associated with age in both humans and rats; and/or the cells are human and/or rat cells. In certain embodiments, a plurality of the methylation markers observed are selected to be methylation markers whose methylation status is universally associated with age in mammals and/or the cells are human, mouse and/or rat cells. In certain embodiments, a plurality of the methylation markers observed are selected to be methylation markers whose methylation status is universally associated with age in mammals and/or the cells are human, mouse and/or rat cells. In certain embodiments, a plurality of the methylation markers observed are selected to be methylation markers whose methylation status is associated with maximum lifespan in in humans and other mammals; and/or the cells are human and/or mouse cells.

[0036] In certain embodiments of the methods of observing the effects of one or more test agents on genomic methylation associated epigenetic aging, methylation is observed by a process comprising treatment of genomic DNA from the population of cells from the individual with bisulfite to transform unmethylated cytosines of CpG dinucleotides in the genomic DNA to uracil; genomic DNA is obtained from fibroblasts, keratinocytes, buccal cells, endothelial cells, lymphoblastoid cells, and/or cells obtained from blood, skin, dermis, epidermis or saliva; genomic DNA is hybridized to a complimentary sequence disposed on a microarray; and/or correlating observed methylation in the methylation markers comprises a regression analysis.

### FURTHER ILLUSTRATIVE ASPECTS AND EMBODIMENTS OF THE INVENTION

[0037] Novel molecular biomarkers of aging, such as those termed “DNAm age”, “epigenetic age” or “apparent methylomic aging rate” allow one to prognosticate mortality, are interesting to gerontologists (aging researchers), epidemiologists, medical professionals, and medical underwriters for life insurances. Exclusively clinical biomarkers such as lipid levels, body mass index, blood pressures have a long and successful history in the life insurance industry. By contrast, molecular biomarkers of aging have rarely been used.

[0038] DNA methylation refers to chemical modifications of the DNA molecule. Technological platforms such as the Illumina Infinium microarray or DNA sequencing-based methods have been found to lead to highly robust and reproducible measurements of the DNA methylation levels of a person. There are more than 28 million CpG loci in the human genome. Consequently, certain loci are given unique identifiers such as those found in the Illumina CpG loci database (see, e.g. Technical Note: Epigenetics, CpG Loci Identification ILLUMINA Inc. 2010). These CG locus designation identifiers are used herein. In this context, one embodiment of the invention is a method of obtaining information useful to observe biomarkers associated with a phenotypic age of an individual by observing the methylation status of one or more of the methylation marker specific GC loci that are identified herein.

[0039] The term “epigenetic” as used herein means relating to, being, or involving a chemical modification of the DNA molecule. Epigenetic factors include the addition or removal of a methyl group which results in changes of the DNA methylation levels.

[0040] The term “nucleic acids” as used herein may include any polymer or oligomer of pyrimidine and purine bases, preferably cytosine, thymine, and uracil, and adenine and guanine, respectively. The present invention contemplates any deoxyribonucleotide, ribonucleotide or peptide nucleic acid component, and any chemical variants thereof, such as methylated, hydroxymethylated or glycosylated forms of these bases, and the like. The polymers or oligomers may be heterogeneous or homogeneous in composition, and may be isolated from naturally-occurring sources or may be artificially or synthetically produced. In addition, the nucleic acids may be DNA or RNA, or a mixture thereof, and may exist permanently or transitionally in single-stranded or double stranded form, including homoduplex, heteroduplex, and hybrid states.

[0041] The term “methylation marker” as used herein refers to a CpG position that is potentially methylated. Methylation typically occurs in a CpG containing nucleic acid. The CpG containing nucleic acid may be present in, e.g., in a CpG island, a CpG doublet, a promoter, an intron, or an exon of gene. For instance, in the genetic regions provided herein the potential methylation sites encompass the promoter/enhancer regions of the indicated genes. Thus, the regions can begin upstream of a gene promoter and extend downstream into the transcribed region.

[0042] The term “gene” as used herein refers to a region of genomic DNA associated with a given gene. For example, the region can be defined by a particular gene (such as protein coding sequence exons, intervening introns and associated expression control sequences) and its flanking sequence. It is, however, recognized in the art that methylation in a particular region is generally indicative of the methylation status at proximal genomic sites. Accordingly, determining a methylation status of a gene region can comprise determining a methylation status of a methylation marker within or flanking about 10 bp to 50 bp, about 50 to 100 bp, about 100 by to 200 bp, about 200 by to 300 bp, about 300 to 400 bp, about 400 by to 500 bp, about 500 bp to 600 bp, about 600 to 700 bp, about 700 bp to 800 bp, about 800 to 900 bp, 900 bp to 1 kb, about 1 kb to 2 kb, about 2 kb to 5 kb, or more of a named gene, or CpG position.

[0043] The phrase “selectively measuring” as used herein refers to methods wherein only a finite number of methylation marker or genes (comprising methylation markers) are measured rather than assaying essentially all potential methylation marker (or genes) in a genome. For example, in some aspects, “selectively measuring” methylation markers or genes comprising such markers can refer to measuring at least 500, 400, 300, 200, 100, 50 or different methylation markers disclosed herein. In other aspects, “selectively measuring” methylation markers or genes comprising such markers can refer to measuring no more than 500, 400, 300, 200, 100, 50 or 40 different methylation markers disclosed herein.

[0044] The invention described herein provides novel and powerful predictors of chronological and epigenetic age, life; expectancy, mortality, and morbidity based on DNA methylation levels. The disclosure presented herein surrounding the prediction of mortality and morbidity show that DNAm based biomarkers are highly robust and informative for a range of applications. DNAm age can not only be used to directly predict/prognosticate age and mortality but also relate to a host of age-related conditions such as heart disease risk, cancer risk, dementia status, cardiovascular disease and various measures of frailty. Further embodiments and aspects of the invention are discussed below.

[0045] DNA methylation of the methylation markers can be measured using various approaches, which range from commercial array platforms (e.g. from Illumina™) to sequencing approaches of individual genes. This includes standard lab techniques or array platforms. A variety of methods for detecting methylation status or patterns have been described in, for example U.S. Pat. Nos. 6,214,556, 5,786,146, 6,017,704, 6,265,171, 6,200,756, 6,251,594, 5,912,147, 6,331,393, 6,605,432, and 6,300,071 and US Patent Application Publication Nos. 20030148327, 20030148326, 20030143606, 20030082609 and 20050009059, each of which are incorporated herein by reference. Other array-based methods of methylation analysis are disclosed in U.S. patent application Ser. No. 11/058,566. For a review of some methylation detection methods, see, Oakeley, E. J., Pharmacology & Therapeutics 84:389-400 (1999). Available methods include, but are not limited to: reverse-phase HPLC, thin-layer chromatography, SssI methyltransferases with incorporation of labeled methyl groups, the chloracetaldehyde reaction, differentially sensitive restriction enzymes, hydrazine or permanganate treatment (m5C is cleaved by permanganate treatment but not by hydrazine treatment), sodium bisulfite, combined bisulphate-restriction analysis, and methylation sensitive single nucleotide primer extension.

[0046] The methylation levels of a subset of the DNA methylation markers disclosed herein are assayed (e.g. using an Illumina™ DNA methylation array or using a PCR protocol involving relevant primers). To quantify the methylation level, one can follow the standard protocol described by Illumina™ to calculate the beta value of methylation, which equals the fraction of methylated cytosines in that location. The invention can also be applied to any other approach for quantifying DNA methylation at locations near the genes as disclosed herein. DNA methylation can be quantified using many currently available assays which include, for example:
[0047] a) Molecular break light assay for DNA adenine methyltransferase activity is an assay that is based on the specificity of the restriction enzyme DpnI for fully methylated (adenine methylation) GATC sites in an oligonucleotide labeled with a fluorophore and quencher. The adenine methyltransferase methylates the oligonucleotide making it a substrate for DpnI. Cutting of the oligonucleotide by DpnI gives rise to a fluorescence increase.
[0048] b) Methylation-Specific Polymerase Chain Reaction (PCR) is based on a chemical reaction of sodium bisulfite with DNA that converts unmethylated cytosines of CpG dinucleotides to uracil or UpG, followed by traditional PCR. However, methylated cytosines will not be converted in this process, and thus primers are designed to overlap the CpG site of interest, which allows one to determine methylation status as methylated or unmethylated. The beta value can be calculated as the proportion of methylation.
[0049] c) Whole genome bisulfite sequencing, also known as BS-Seq, is a genome-wide analysis of DNA methylation. It is based on the sodium bisulfite conversion of genomic DNA, which is then sequencing on a Next-Generation Sequencing (NOS) platform. The sequences obtained are then re-aligned to the reference genome to determine methylation states of CpG dinucleotides based on mismatches resulting from the conversion of unmethylated cytosines into uracil.
[0050] d) The Hpall tiny fragment Enrichment by Ligation-mediated PCR (HELP) assay is based on restriction enzymes' differential ability to recognize and cleave methylated and unmethylated CpG DNA sites.
[0051] e) Methyl Sensitive Southern Blotting is similar to the HELP assay but uses Southern blotting techniques to probe gene-specific differences in methylation using restriction digests. This technique is used to evaluate local methylation near the binding site for the probe.
[0052] f) ChIP-on-chip assay is based on the ability of commercially prepared antibodies to bind to DNA methylation-associated proteins like MeCP2.
[0053] g) Restriction landmark genomic scanning is a complicated and now rarely-used assay is based upon restriction enzymes differential recognition of methylated and unmethylated CpG sites. This assay is similar in concept to the HELP assay.
[0054] h) Methylated DNA immunoprecipitation (MeDIP) is analogous to chromatin immunoprecipitation. Immunoprecipitation is used to isolate methylated DNA fragments for input into DNA detection methods such as DNA microarrays (MeDIP-chip) or DNA sequencing (MeDIP-seq).
[0055] i) Pyrosequencing of bisulfate treated DNA is a sequencing of an amplicon made by a normal forward primer but a biotinylatod reverse primer to PCR the gene of choice. The Pyrosequencer then analyses the sample by denaturing the DNA and adding one nucleotide at a time to the mix according to a sequence given by the user. If there is a mismatch, it is recorded and the percentage of DNA for which the mismatch is present is noted. This gives the user a percentage methylation per CpG island.

[0056] In certain embodiments of the invention, the genomic DNA is hybridized to a complimentary sequence (e.g. a synthetic polynucleotide sequence) that is coupled to a matrix (e.g. one disposed within a microarray). Optionally, the genomic DNA is transformed from its natural state via amplification by a polymerase chain reaction process. For example, prior to or concurrent with hybridization to an array, the sample may be amplified by a variety of mechanisms, some of which may employ PCR. See, for example, PCR Technology: Principles and Applications for DNA Amplification (Ed. H. A. Erlich. Freeman Press, NY, N.Y., 1992); PCR Protocols: A Guide to Methods and Applications (Eds. Innis, et al., Academic Press, San Diego, Calif., 1990); Mattila et al., Nucleic Acids Res. 19, 4967 (1991); Eckert et al., PCR Methods and Applications 1, 17 (1991); PCR (Eds. McPherson et al., IRL Press, Oxford); and U.S. Pat. Nos. 4,683,202, 4,683,195, 4,800,159, 4,965,188, and 5,333,675. The sample may be amplified on the array. See, for example, U.S. Pat. No. 6,300,070, which is incorporated herein by reference.

[0057] In addition to using art accepted modeling techniques on data obtained from embodiments of the invention (e.g. regression analyses), embodiments of the invention can utilize a variety of art accepted technical processes. For example, in certain embodiments of the invention, a bisulfite conversion process is performed so that cytosine residues in the genomic DNA are transformed to uracil, while 5-methylcytosine residues in the genomic DNA are not transformed to uracil. Kits for DNA bisulfite modification are commercially available from, for example. MethylEasy™ (Human Genetic Signatures™) and CpGenome™ Modification Kit (Chemicon™). See also, WO04096825A1, which describes bisulfite modification methods and Olek et al. Nuc. Acids Res. 24:5064-6 (1994), which discloses methods of performing bisulfite treatment and subsequent amplification. Bisulfite treatment allows the methylation status of cytosines to be detected by a variety of methods. For example, any method that may be used to detect a SNP may be used, for examples, see Syvanen, Nature Rev. Gen. 2:930-942 (2001). Methods such as single base extension (SBE) may be used or hybridization of sequence specific probes similar to allele specific hybridization methods. In another aspect the Molecular Inversion Probe (MIP) assay may be used.

[0058] The polynucleotides showing genomic sequences having the CpG sites discussed herein are found in Table 1. The Illumina method takes advantage of sequences flanking a CpG locus to generate a unique CpG locus cluster ID with a similar strategy as NCBI's refSNP IDs (rs #) in dbSNP (see, e.g. Technical Note: Epigenetics, CpG Loci Identification ILLUMINA Inc. 2010).

### EXAMPLES

### Example 1: Epigenetic Clocks for Dogs and Humans

[0059] The references cited in this Example are found at the end of this Example.

[0060] DNA methylation profiles have been used to develop biomarkers of aging known as epigenetic clocks, which predict chronological age with remarkable accuracy and show promise for inferring health status as an indicator of biological age. Epigenetic clocks were first built to monitor human aging but the principles underpinning them appear to be evolutionarily conserved. Here we describe reliable and highly accurate epigenetic clocks shown to apply to 51 domestic dog breeds. The methylation profiles were generated using a custom array with DNA sequences that are conserved across all mammalian species (HorvathMammalMethylChip40). Canine epigenetic clocks were constructed to estimate age. We also present two highly accurate human-dog dual species epigenetic clocks (R=0.97), which may facilitate the ready translation from canine to human use (or vice versa) of anti-aging treatments being developed for longevity and preventive medicine.

### Results

### DNA Methylation Data

[0061] All DNA methylation data were generated using the mammalian methylation array (HorvathMammalMethylChip40) that measures cytosine methylation levels in highly conserved regions across mammals (1). We analyzed methylation profiles from 565 blood samples derived from 51 dog breeds (Canis lupus familiaris). The 51 breeds ranged from Bernese mountain dog, with the shortest expected lifespan of eight years (average adult breed weight=41 kg) to Chihuahuas with the highest expected lifespan at 20 years (average adult breed weight=1.8 kg). Expected lifespan estimates were based on the upper limit of lifespan estimated by the American Kennel Club and other registering bodies using sex averaged measures (2). Unsupervised hierarchical clustering demonstrates that methylation profiles grouped by sex above breed, i.e., most females were in one branch while most males grouped in a second branch. We did not find any evidence of grouping by breed.

### Epigenetic Clocks

[0062] The dog-only clocks were developed using blood DNA, while the human DNA that was used to generate the human-dog clocks were either from blood or multiple human tissues. The distinction between the two human-dog clocks lies in measurement parameters. One estimates chronological age (in units of years), while the other estimates relative age, which is the ratio of age of an individual to the maximum recorded lifespan of the species, with values between 0 and 1. This ratio allows alignment and biologically meaningful comparison between species with very different lifespans (dog and human), which is not afforded by the simple measurement of chronological age.

[0063] The cross-validation study reports unbiased estimates of the age correlation R, defined as Pearson correlation between the age estimate (DNAm age) and chronological age, as well as the median absolute error. Cross-validation estimates of age correlation for the three dog clocks are 0.97 (FIG. 1a, b, f, h). Different cross validation schemes show that both the pure dog clock and the human-dog clock for chronological age exhibit a median error of less than 0.57 years (seven months) when using blood samples from dogs (FIG. 1a, b, f, i).

[0064] By definition, the pure dog clock is not expected to apply to human tissues. However, we observe a remarkably high age correlation in DNA from human blood samples (r=0.77), albeit with a large median error of 32 years (FIG. 1d). The age correlation of the dog clock across a variety of human tissues is lower (r=0.52, FIG. 1c). By contrast, the two human dog clocks are highly accurate in both species (FIG. 1e-j). The human-dog clock for chronological age led to a high age correlation of R=0.99 when both species are analyzed together (FIG. 1e) and remained so when the analysis was restricted to dog samples alone (R=0.97, FIG. 1f). Similarly, the human-dog clock for relative age exhibits a high correlation regardless of whether the analysis is done with samples from both species (R=0.98, FIG. 1g) or only from dogs (R=0.97, FIG. 1h). The impressive accuracy of the human-dog clocks could also be corroborated with an alternative cross validation scheme, i.e., a “leave one dog breed out” (LOBO) cross validation scheme (FIG. 1i,j), which estimates the clock accuracy in dog breeds not used in the training set.

### Epigenetic Clock to Predict Average Time-to-Death

[0065] Although epigenetic age clocks can be indirectly employed to predict risk or mortality, their performance may be sub-optimal, as they were developed for the clear purpose of estimating age (3, 4). The DNA methylation data that we generate, however, can be used to develop an epigenetic predictor of average time to death (“DNAmAverageTimeToDeath”), using a penalized regression model (Methods). To evaluate predictive accuracy, we used LOBO cross-validation that divided the dataset into 51 breed groups. At each round, LOBO cross-validation trained each model on all but one breed, which was left out and used for validation at each iteration. LOBO analysis revealed a high correlation (r=0.89. FIG. 2a) between estimated and actual average time to death with a median absolute error (MAE) of 1.3 years. As the successful performance of the LOBO analysis was carried out with 51 distinct breeds, we hypothesize that this model can be extrapolated to breeds not included in our dataset.

[0066] We observed that age-adjusted DNAmAverageTimeToDeath was correlated in the expected direction with lifespan (r=0.36 and P=9.9×10-19 FIG. 2b) and average adult breed weight (r=−0.4 and P=3.1×10-21, FIG. 2c). To account for correlated evolution of traits (lifespan, adult weight, etc.) among breeds, we applied phylogenetically independence contrasts (PICs) analysis to our study traits at the breed level. Age-adjusted DNAmAverageTimeToDeath retained similar degree of correlation with lifespan (r=0.43 and P=1.8×10-3, FIG. 2e) and weight (r=−0.46 and P=1.0×10-3. FIG. 2f), respectively. As expected from its construction. DNAmAverageTimcToDeath has a strong negative correlation with chronological age (r=0.93, FIG. 2d). This is consistent with the fact that younger dogs are many more years away from reaching the upper limit of their lifespan for their respective breed. A multivariate regression model shows that the predictive accuracy of DNAmAverageTimeToDeath is retained even after adjusting for chronological age, gender and the average adult weight of the breed (P=1.56×10-3).

### General Background DNA Methylation Based Biomarkers

[0067] DNA based biomarker that changes with age is DNA methylation; specifically of cytosine residues of cytosine-phosphate-guanine dinucleotides (CpGs). Machine learning-based analyses of these changes generated algorithms, known as epigenetic clocks that use specific CpG methylation levels to accurately estimate age that is referred to as DNA methylation age (DNAm age)(5-8).

[0068] DNAm aging assays are already highly robust and ready for biomarker development; as reported by the BLUEPRINT consortium (9). DNAm based biomarkers are highly promising molecular biomarkers of aging (10, 11).

### Materials and Methods

### Materials

[0069] In total, we analyzed DNA from n=565 blood samples (dogs) from 51 breeds. Samples were provided by researchers at the National Human Genome Research Institute (NHGRI) and collection was approved by the Animal Care and Use Committee of the Intramural Program of NHGRI at the National Institutes of Health (Protocol 8329254). The median dog age was 5.6 years (range=0.1-17 years). DNA isolated blood samples from dogs were used to build an epigenetic clock for dogs. To build human-dog clocks we added n=1207 human tissue samples to the training data.

### Lifespan and Breed Characteristics

[0070] For each phenotype, we used the average of the standard breed (male+female average). Standard breed weights (SBW), height (SBH) and life span were obtained from several sources: weights and height previously listed in 16, 33, although they were updated if weights specified by the AKC 10 were different. If the AKC did not specify SBW, SBH or life span, we used data from Atlas of Dog Breeds of the World 34. SBW. SBH and life span were applied to all samples from the same breed. Lifespan estimates are available for all dogs within the 51 breeds. Since Bull Terrier and Dachshund breeds have both standard and miniature sizes, the adult weights differ between these two sizes. Therefore, we assigned weight as missing for those breeds in this analysis.

### Human Tissue Samples

[0071] To build the human-dog clock, we analyzed previously generated methylation data from n=1207 human tissue samples (adipose, blood, bone marrow, dermis, epidermis, heart, keratinocytes, fibroblasts, kidney, liver, lung, lymph node, muscle, pituitary, skin, spleen) from individuals whose ages ranged from 0 to 93. The tissue samples came from three sources: tissue and organ samples came from the National NeuroAIDS Tissue Consortium 35; blood samples from the Cape Town Adolescent Antiretroviral Cohort study 36; blood, skin and other primary cells were provided by Kenneth Raj 37. All were obtained with Institutional Review Board approval (IRB #15-001454, IRB #16-000471, IRB #18-000315, IRB #16-002028).

### DNA Methylation

[0072] All data were generated on the platform (HorvathMammalMethylChip40). The mammalian array provides high coverage (over one thousand-fold) of highly conserved CpGs in mammals, but focuses only on 36k CpGs that are highly conserved across mammals. Out of 37,492 CpGs on the array, 35,988 probes were chosen to assess cytosine DNA methylation levels in mammalian species 9. The particular subset of species for each probe is provided in the chip manifest file which can be found at Gene Expression Omnibus (GEO) at NCBI as platform GPL28271. The SeSaMe normalization method was used to define beta values for each probe 38. Genome coordinates for different dog breeds have been posted on Github as detailed in the section on Data Availability.

### Penalized Regression Models

[0073] We developed the six different epigenetic clocks for dogs by regressing chronological age on all CpGs. Age was not transformed. We used all tissues for the pan-tissue clock. We restricted the analysis to blood, liver, and brain tissue for the blood, liver, and brain tissue clocks, respectively. Penalized regression models were created with the R function “glmnet” 39. We investigated models produced by both “elastic net” regression (alpha=0.5). The optimal penalty parameters in all cases were determined automatically by using a 10-fold internal cross-validation (cv.glmnet) on the training set. By definition, the alpha value for the elastic net regression was set to 0.5 (midpoint between Ridge and Lasso type regression) and was not optimized for model performance. We performed a cross-validation scheme for arriving at unbiased (or at least less biased) estimates of the accuracy of the different DNAm based age estimators. One type consisted of leaving out a single sample (LOOCV) from the regression, predicting an age for that sample, and iterating over all samples.

### Relative Age Estimation

[0074] To introduce biological meaning into age estimates of dogs and humans with very different lifespans, as well as to overcome the inevitable skewing due to unequal distribution of data points from dogs and humans across age range, relative age estimation is made using the formula: Relative age=Age/maxLifespan where the maximum lifespan for dogs and humans were set to 24 years and 122.5 years, respectively.

Epigenome Wide Association Studies (EWAS) of Age. Lifespans and Weight

[0075] EWAS was performed in each tissue separately using the R function “standardScreeningNumericTrait” from the “WGCNA” R package 40.

### Epigenetic Clock for Average Time to Death

[0076] We did not have follow-up information (time to death) available for individual dogs in our study. To create a surrogate variable for this important endpoint, we leveraged two other variables: 1) the upper limit of lifespans estimated from the American Kennel Club and other registering bodies (variable name “Lifespan.HighClubBreeder” 10) and 2) the chronological age at the time of the blood draw. For each dog, we defined average time to death (AverageTimeToDeath) as the difference between LifespanHighClubBreeder and chronological age.

[0077] To assess the accuracy of the elastic net regression models, we used leave-one-breed-out (LOBO) cross validation. The LOBO cross validation approach trained each model on all but one breeder. The “left out” breed was then used as a test set. The LOBO approach assesses how well the penalized regression models generalize to breeds that were not part of the training data. To ensure unbiased estimates of accuracy, all aspects of the model fitting (including pre-filtering of the CpG) were only conducted in the training data for the LOBO analysis. We fitted the glmnet model to the top 5000 CpGs with the most significant median Z score (lifespan correlation test) in the training data. We average the methylome for each breed and performed EWAS of lifespan (N=50 breeds in training dataset) to select the top 5000 CpGs.

### Practicing the Invention of DNAm Based Biomarkers

[0078] To use the epigenetic biomarker one can typically extract DNA from cells or fluids, e.g. blood cells, whole blood, peripheral blood mononuclear cells, saliva, buccal swabs. Next, one needs to measure DNA methylation levels in the underlying signature of CpGs (epigenetic markers) that are being used in the mathematical algorithm. The algorithm leads to an estimate of age for each DNA sample.

### Technical Details Surrounding the DNAm Age Estimator

### Statistical Methods Used for Building the Clocks

[0079] The final clocks were used by employing a single elastic net regression model analysis (R function glmnet) on the preliminary training set and final training set, respectively. Details can be found in the scientific publication (Horvath et al 2020). We use used Leave-one-out analysis (LOO) using a single lambda value. We chose the following parameters for the glmnet R function (Alpha: 0.5, CV Fold: 10. Lambda choice for Clock: 1 standard error above minimum CV-MSE).

### Covariates and Coefficient Values of the Dog Clocks

[0080] The dog tissue clock is based on 45 CpGs whose coefficient values are specified in the column “Coef.Dog”. Age transformation=identity, i.e. F(Age)=Age

[0081] The human dog pan tissue clock for chronological age is based on 505 CpGs whose coefficient values are specified in the column “Coef.HumanDogPanTissueLogLinearAge”. Age transformation=log-linear described below. The human dog blood clock for chronological age is based on 109 CpGs whose coefficient values are specified in the column “Coef.HumanDogBlood”. Age transformation=identity.

[0082] The human dog pan tissue clock for relative age is based on 473 CpGs whose coefficient values are specified in the column “Coef.HumanDogPanTissueRelativeAge”. Age transformation: relative age. i.e. F(Age)=Age/maxLifespan where the maximum lifespan for dogs and humans were set to 24 years and 122.5 years, respectively.

[0083] The human dog blood clock for relative age is based on 110 CpGs whose coefficient values are specified in the column “Coef.HumanDogBloodRelativeAge”. Age transformation: relative age. i.e. F(Age)=Age/maxLifespan.

[0084] Epigenetic estimator of average time to death is based on 367 CpGs whose coefficient values are specified in the column “Coef.AverageTimeToDeath”. Age transformation=identity, i.e. F(Age)=Age

[0085] General description of age transformation The human-dog clocks for chronological age used log linear transformations that are similar to those employed for the HUMAN pan tissue (Horvath 2013) (12).

[0086] Thus, the dependent variable, chronological age, was transformed before carrying out an elastic net regression analysis. Toward this end, the function F(x) where the argument is an age estimate.

[0087] Note that F satisfies the following desirable properties: it
[0088] i) is a continuous, monotonically increasing function (which can be inverted),
[0089] ii) has a logarithmic dependence during development
[0090] iii) has a linear dependence on age after development
[0091] iv) is defined for negative ages (i.e. prenatal samples)
[0092] v) it has a continuous first derivative (slope function).

[0093] An elastic net regression model (implemented in the glmnet R function) was used to regress a transformed version of age on the beta values in the training data. The glmnet function requires the user to specify two parameters (alpha and beta). Since I used an elastic net predictor, alpha was set to 0.5. But the lambda value of was chosen by applying a 10 fold cross validation to the training data (via the R function cv.glmnet).

[0094] The elastic net regression results in a linear regression model whose coefficients b0, b1, . . . , relate to transformed age as follows

$$F ( chronological age ) = b 0 + b 1 CpG 1 + … + bpCpGp + error$$

[0095] Note that the intercept term is denoted by b0.

[0096] Based, on the coefficient values from the regression model, DNAmAge is estimated as follows

$$DNAmAge = {F}^{⋀} ( - 1 ) ( b 0 + b 1 CpG 1 + … + bpCpGp )$$

[0097] where F\hat{ }(−1) (y) denotes the mathematical inverse of the function F(·) Thus, the regression model can be used to predict to transformed age value by simply plugging the beta values of the selected CpGs into the formula.

### Defining Properties of the Log Linear Transformation

[0098] As indicated by its name, the “log-linear” function, has a logarithmic dependence on age before the average age of sexual maturity (of the species) and a linear dependence after Age at Sexual Maturity (of the species). For the human-dog clocks we used the following averages at sexual maturity (in units of years): 13.5 years for humans and 1.40 years for dogs.

### Construction

[0099] We used a piecewise transformation, parameterized by Age of Sexual Maturity (A).

[0100] The transformation is F(x), given by

$$F ( x ) = g ( \frac{x + 1.5}{A + 1.5} ) where p ( t ) = \{ \begin{matrix}log ( t ) , & for 0 \leq t \leq 1 \\ t - 1 , & for 1 \leq t\end{matrix}$$

[0101] Explicitly. F(x) is given by

$$F ( x ) = \{ \begin{matrix}log ( \frac{x + 1.5}{A + 1.5} ) , & for 0 \leq x \leq A \\ \frac{x - A}{A + 1.5} , & for A \leq x\end{matrix}$$

[0102] In order to use this transformation to predict Age on new samples, one needs to use the inverse transformation, F⁻¹(y), given by

$${F}^{- 1} ( y ) = \{ \begin{matrix}( A + 1.5 ) * exp ( y ) - 1.5 , & for y \leq 0 \\ ( A + 1.5 ) y + A , & for y \geq 0\end{matrix}$$

[0103] For predicting age, you will apply the inverse transformation to coefficient-weighted sum.

[0104] That is,

$$DNAmAge = {F}^{- 1} ( x * β )$$

where β is the vector of coefficients and x is the vector of methylation values, with an intercept term.

[0105] The DNAm Age estimate is estimated in two steps.

[0106] First, one forms a weighted linear combination of the CpGs whose details can be found, for example, in Tables 100-107 of U.S. Provisional Patent Application Ser. No. 63/215,289, the contents of which are incorporated by reference.

[0107] The table reports the probe identifier (cg number) used in the custom Infinium array (HorvathMammalMethylChip40). The weights used in this linear combination are specified in the respective column entitled “Coef”.

[0108] The formula assumes that the DNA methylation data measure “beta” values but the formula could be adapted to other ways of generating DNA methylation data.

[0109] Second, the weighted average of the CpGs is transformed using a monotonically increasing function so that it is in units of years.

$$DNAmAge = {F}^{⋀} ( - 1 ) ( WeightedAverage )$$

[0110] A novel aspect of the above-noted invention is the development of epigenetic biomarkers that apply to two species (dogs and humans) at the same time. A single mathematical formulas based on the same methylation probes can be used to measure age in both species based on any tissue sample (i.e. these are pan tissue clocks). The fact these epigenetic biomarkers apply to both species greatly increases the likelihood that findings from preclinical studies in dogs will actually translate to humans.

[0111] One of the human-dog clocks measures relative age (defined as ratio of age by maximum lifespan). This clock puts both species on the same footing. The relative age of 0.5 corresponds to 61 years in humans (half of 122 years) and 12 years in dogs (half of 24 years).

[0112] Novel “biomarkers of aging”, i.e. assessments that allow one to measure age, are interesting to gerontologists (aging researchers), anti-aging researchers, pharmaceutical companies that carry out preclinical studies.

[0113] Overall, we expect that these epigenetic biomarkers will become useful biomarkers for preclinical studies using dogs because they capture the physiological aging state, thus allowing efficacy of interventions to be evaluated based on real-time measures of aging, rather than relying on long-term outcomes, such as morbidity and mortality.

[0114] Finally, this measure may be another component of other molecular biomarkers of aging.

[0115] In summary, the invention provides novel epigenetic biomarker of aging. Strikingly, some of these biomarkers apply to two species: dogs and humans.

[0116] It is critical to distinguish molecular biomarkers such as DNAm Age from clinical biomarkers of aging. Clinical biomarkers such as lipid levels, blood pressure, blood cell counts have a long and successful history in clinical practice. By contrast, molecular biomarkers of aging are rarely used. However, this is likely to change due to recent breakthroughs in DNA methylation based biomarkers of aging. DNA methylation (DNAm) based biomarkers of aging promise to greatly enhance biomedical research, clinical applications, and preclinical studies. They will also be more useful for preclinical studies and intervention assessment that target aging, since they are more proximal to the biological changes that characterize the aging process compared to upstream clinical read outs of health and disease status.

[0117] While these DNAm based biomarkers will probably not replace traditional biomarker assessments, they provide complementary information that adds valuable information, with preclinical applications.

### REFERENCES

[0118] 1. Arneson A. Haghani A, Thompson M J, Pellegrini M. Kwon S B, Vu H, Li C Z, Lu A T, Barnes B. Hansen K D, et al: A mammalian methylation array for profiling methylation levels at conserved sequences. bioRxiv 2021:2021.2001.2007.425637.
[0119] 2. TheAmericanKennelClub: The Complete Dog Book: 20th Edition. 20th Edition edn. New York, NY: Howell Book House, 2006.
[0120] 3. Horvath S, Raj K: DNA methylation-based biomarkers and the epigenetic clock theory of ageing. Nat Rev Genet 2018.
[0121] 4. Lu A T, Quach A, Wilson J G, Reiner A P, Aviv A, Raj K, Hou L, Baccarelli A A, Li Y, Stewart J D, et al: DNA methylation GrimAge strongly predicts lifespan and healthspan. Aging (Albany NY) 2019, 11:303-327.
[0122] 5. Hannum G: Genome-wide methylation profiles reveal quantitative views of human aging rates. Mol Cell 2013, 49.
[0123] 6. Lin Q, Weidner C I, Costa I G, Marioni R E, Ferreira M R P, Deary I J: DNA methylation levels at individual age-associated CpG sites can be indicative for life expectancy. Aging 2016, 8:394-401.
[0124] 7. Horvath S: DNA methylation age of human tissues and cell types. Genome Biol 2013, 14.
[0125] 8. Horvath S, Oshima J, Martin G M, Lu A T, Quach A, Cohen H, Felton S, Matsuyama M, Lowe D, Kabacik S, et al: Epigenetic clock for skin and blood cells applied to Hutchinson Gilford Progeria Syndrome and ex vivo studies. Aging (Albany NY) 2018, 10:1758-1775.
[0126] 9. The Bc, Bock C, Halbritter F, Carmona F J, Tierling S, Datlinger P. Assenov Y, Berdasco M, Bergmann A K, Booher K, et al: Quantitative comparison of DNA methylation assays for biomarker development and clinical applications. Nature Biotechnology 2016, 34:726.
[0127] 10. Jylhava J. Pedersen N L, Hagg S: Biological Age Predictors. EBioMedicine 2017, 21:29-36.
[0128] 11. Horvath S, Raj K: DNA methylation-based biomarkers and the epigenetic clock theory of ageing. Nat Rev Genet 2018, 19:371-384.
[0129] 12. Horvath S: DNA methylation age of human tissues and cell types. Genome Biol 2013, 14:R115.
[0130] 13. Bocklandt S, Lin W. Sehl M E, Sanchez F J, Sinsheimer J S, Horvath S, Vilain E: Epigenetic predictor of age. PLoS One 2011, 6.
[0131] 14. Weidner C I: Aging of blood can be tracked by DNA methylation changes at just three CpG sites. Genome Biol 2014, 15.
[0132] 15. Hannum G, Guinney J, Zhao L. Zhang L, Hughes G, Sadda S, Klotzle B, Bibikova N, Fan J B, Gao Y, et al: Genome-wide methylation profiles reveal quantitative views of human aging rates. Mol Cell 2013. 49:359-367.
[0133] 16. Marioni R, Shah S, McRae A, Chen B, Colicino E, Harris S, Gibson J, Henders A, Redmond P, Cox S, et al: DNA methylation age of blood predicts all-cause mortality in later life. Genome Biol 2015, 16:25.
[0134] 17. Christiansen L, Lenart A, Tan Q, Vaupel J W, Aviv A, McGue M, Christensen K: DNA methylation age is associated with mortality in a longitudinal Danish twin study. Aging Cell 2015.
[0135] 18. Pema L, Zhang Y, Mons U. Holleczek B. Saum K U, Brenner H: Epigenetic age acceleration predicts cancer, cardiovascular, and all-cause mortality in a German case cohort. Clinical Epigenetics 2016, 8:1-7.

### Example 2: Epigenetic Clocks for Rats and Humans

[0136] The references cited in this Example are found at the end of this Example.

[0137] When considering the concept of aging and rejuvenation, it is important to appreciate that improved health or organ function through medication or surgery does not necessarily indicate molecular age reversal. Hence, it is conceptually challenging to test whether plasma fraction treatment, or any other putative treatment, actually reverses biological age, because there is no consensus on how to measure biological aging (1). We addressed this challenge by using both clinical biomarkers and molecular biomarkers of aging. While clinical biomarkers have obvious advantages (being indicative of organ dysfunction or disease), they are neither sufficiently mechanistic nor proximal to fundamental mechanisms of aging to serve as indicators of them. It has long been recognized that epigenetic changes are one of several primary hallmarks of aging (2-6). With the technical advancement of methylation army platforms that can provide quantitative and accurate profiles of specific CpG methylations: came the insight to combine methylation levels of several DNA loci to develop an accurate age estimator (7-11). Such DNA methylation (DNAm) age estimators exhibit unexpected properties: they apply to all sources of DNA (sorted cells, tissues, and organs) and surprisingly to the entire age spectrum (from prenatal tissue samples to tissues of centenarians) (10, 12). A substantial body of literature demonstrates that these epigenetic clocks capture aspects of biological age (12). This is demonstrated by the finding that the discrepancy between DNAm age and chronological age (term as “epigenetic age acceleration”) is predictive of all-cause mortality even after adjusting for a variety of known risk factors (13-15). Pathologies and conditions that are associated with epigenetic age acceleration includes, but are not limited to, cognitive and physical functioning (16), centenarian status (15, 17), Down syndrome (18), HIV infection (19), obesity (20) and early menopause (21).

[0138] We demonstrated that the human pan-tissue clock can be directly applied to chimpanzee DNA methylation profiles (10), but its performance with profiles of other animals decline as a result of evolutionary genome sequence divergence. Recently, epigenetic clocks for mice were developed and used successfully to evaluate and confirm gold-standard longevity interventions such as calorie restriction and ablation of growth hormone receptor (22-27). These observations strongly suggest that age-related DNA methylation change is an evolutionarily conserved trait and as such, accurate age estimators as those developed for humans can be applied across species. Here we describe the development and performance of different epigenetic clocks for rats. Some of these epigenetic clocks apply to both humans and rats (dual species clocks). We used these epigenetic clocks to evaluate the plasma fraction-based treatment in 4 rat tissues from 2-year-old rats.

### Results

### DNA Methylation Data

[0139] All DNA methylation data were generated on a custom methylation array that applies to all mammals. We obtained in total, DNA methylation profiles of over n=553 samples from 13 different tissues of rat (Rattus norvegicus), with ages that ranged from 0.0384 years (i.e. 2 weeks) to 2.3 years (i.e. 120 weeks). The rat tissue samples came from 3 different countries: (i) India (Nugenics Research in collaboration with NMIMS School of Pharmacy's), (ii) the United States (H. Chen and L. Solberg Woods), and (iii) Argentina (R. Goya). Unsupervised hierarchical clustering shows that the methylation profiles clustered by tissue type, as would be expected.

[0140] Our DNA methylation-based age estimators (epigenetic clocks) were developed (“trained” in the parlance of machine learning) using the rat tissues. The two epigenetic clocks that apply to both species were developed by adding n=1207 human tissue samples to the rat training set. Both rat and human tissues were profiled on the same methylation array platform (HorvathMammalMethylChip40) that focuses on 36,000 highly conserved CpGs (Methods).

### Epigenetic Clocks

[0141] Our six different clocks for rats can be distinguished along several dimensions (tissue type, species, and measure of age). Some clocks apply to all tissues (pan-tissue clocks) while others are tailor-made for specific tissues/organs (brain, blood, liver). The rat pan-tissue clock was trained on all available tissues. The brain clock was trained using DNA samples extracted from whole brain, hippocampus, hypothalamus, neocortex, substantia nigra, cerebellum, and the pituitary gland. The liver and blood clock were trained using the liver and blood samples from the training set, respectively. While the four rat clocks (pan-tissue-, brain-, blood-, and liver clocks) apply only to rats, the human-rat clocks apply to both species. The two human-rat pan-tissue clocks are distinct, by way of measurement parameters. One estimates chronological age (in units of years), while the other estimates relative age, which is the ratio of chronological age to maximum lifespan; with values between 0 and 1. This ratio allows alignment and biologically meaningful comparison between species with very different lifespan (rat and human), which is not afforded by mere measurement of chronological age.

[0142] To arrive at unbiased estimates of the six epigenetic clocks, we used a) cross-validation of the training data and b) evaluation with an independent test data set. The cross-validation study reports unbiased estimates of the age correlation R (defined as Pearson correlation between the age estimate (DNAm age) and chronological age) as well as the median absolute error (FIG. 5). The cross-validation estimates of the age correlations for all six clocks are higher than 0.9. The four rat clocks exhibited median absolute errors that range from 0.12 years (1.4 months) for the rat blood clock to 0.189 years (2.3 months) for the rat pan-tissue clock, FIG. 5A-D). The human-rat clock for age generated an age correlation of R=0.99 when both species are analyzed together (FIG. 5E) but is lower when the analysis is restricted to rat tissues alone (R=0.83, FIG. 5F). In contrast, the human-rat clock for relative age exhibits high correlation regardless of whether the analysis is done with samples from both species (R=0.96, FIG. 5G) or only with rat samples (R=0.92, FIG. 5H). This demonstrates that relative age circumvents the skewing that is inherent when chronological age of species with very different lifespans are measured using a single formula. This is due in part to the unequal distribution of training data at the opposite ends of the age range.

[0143] As indicated by its name, the rat pan-tissue clock is highly accurate in age estimation of all the different tissue samples tested. We also evaluated the accuracy of the six epigenetic clocks in independent test data from the plasma fraction test study. In the untreated rat tissue samples, the epigenetic clocks exhibited high age correlations in all tissues (R>=0.95 in blood, liver, and the hypothalamus and R>=0.86 in Heart Tissue).

### Development of Rat Epigenetic Clocks

[0144] Epigenetic clocks for humans have found many biomedical applications including the measure of age in human clinical trials (12, 28). These clocks provide a standard measure of DNA methylation state in function of chronological age. As impressive as its accuracy is, it is the divergence from this standard that was particularly important because it uncovered the association between accelerated epigenetic age and the associated increased risk of a host of conditions and pathologies, indicating that epigenetic clocks are associated with biological age. This instigated development of similar clocks for animals, of which the ones for mice were particularly attractive as they allow for epigenetic age to be modeled in a mouse system, and at the same time allows existing mouse models of aging to be interrogated with regards to epigenetic aging. Indeed, numerous mouse epigenetic clocks have since been developed and successfully validated against factors, such as rapamycin, caloric restriction and growth factor ablation, which are all well-characterized in their effects on aging of mice (22-27). While the advantages of mouse as a biological model lies in no small part to their size, this also poses a limitation in studies that require regular interval collection of sufficient amounts of blood for analyses, as was the case in the second part of this study. The development of six rat epigenetic clocks described here was based on novel DNA methylation data that were derived from thirteen rat tissue types. The two human-rat clocks demonstrate the feasibility of building epigenetic clocks for two species based on a single mathematical formula. A critical step toward crossing the species barrier was the use of a mammalian DNA methylation array that profiled 36 thousand probes that were highly conserved across numerous mammalian species. The rat DNA methylation profiles represent the most comprehensive dataset thus far of matched single base resolution methylomes in rats across multiple tissues and ages. We expect that the availability of these clocks and their impressive performance in the second part of this study will provide a significant boost to the attractiveness of the rat as biological model in aging research.

[0145] Beyond their utility, these clocks reveal several salient features with regards to the biology of aging. First, the rat pan-tissue clock re-affirms the implication of the human pan-tissue clock, which is that aging might be a coordinated biological process that is harmonized throughout the body. Given that the circulatory system irrigates and connects all the organs, it is more likely than not, that the regulation and harmonization of age are mediated systemically. Second, the ability to combine these two pan-tissue clocks into a single human-rat pan-tissue clock attests to the high conservation of the aging process across two evolutionary distant species. This implies, albeit does not guarantee, that treatments that alter the epigenetic age of rats, as measured using the human-rat clock is likely to exert similar effects in humans. If validated, this would be a step change in aging research. Although conservation of aging mechanism could be equally deduced from the existence of multiple individual clocks for other mammals (mouse, dog), the single formula of the human-rat clock that is equally applicable to both species effectively demonstrates this fact. It is evident that the mechanism underpinning aging is a very primitive and important biological process, which ensured its conservation across the mammalian kingdom through time.

[0146] The incorporation of two species with very different lifespans such as rat and human, raises the inevitable challenge of unequal distribution of data points along the age range. The clustering of the shorter and longer lifespan species at the lower and higher age range respectively can skew the accuracy of the clock when it is applied individually to either of the species. This effect is mitigated by the generation of the human-rat pan-tissue relative age clock which embeds the estimated age in context of the maximal lifespan recorded for the of the relevant species. In addition to minimizing the skew, this mathematical operation also generates a much more biologically meaningful value because it indicates the relative biological age and fitness of the organism in relation to its own species. This principle will be an important feature to incorporate in future composite epigenetic clocks of different species.

### General Background DNA Methylation Based Biomarkers

[0147] DNA based biomarker that changes with age is DNA methylation; specifically of cytosine residues of cytosine-phosphate-guanine dinucleotides (CpGs). Machine learning-based analyses of these changes generated algorithms, known as epigenetic clocks that use specific CpG methylation levels to accurately estimate age that is referred to as DNA methylation age (DNAm age)(29-32).

[0148] DNAm aging assays are already highly robust and ready for biomarker development; as reported by the BLUEPRINT consortium (33). DNAm based biomarkers are highly promising molecular biomarkers of aging (34, 35).

### Materials and Methods

[0149] In total, we analyzed n=593 rat tissue samples from 13 different sources of DNA. Ages ranged from 0.0384 years (i.e. 2 weeks) to 2.3 years (i.e. 120 weeks). The rat data were comprised of a training set (n=503) and a test set (n=76). To build human-rat clocks, we added n=1207 human tissue samples to the training data. We first trained/developed epigenetic clocks using the training data (n=503 tissues). Next, we evaluated the data in independent test data (n=76 for evaluating the effect of plasma fraction treatment. We used n=503 tissue to train 4 clocks: a pan-tissue clock based on all available tissues, a brain clock based on regions of the whole brain—hippocampus, hypothalamus, neocortex, substantia nigra, cerebellum, and the pituitary gland, a liver clock based on all liver samples, and a blood clock.

[0150] Tissue sample collection: Before sacrifice by decapitation, rats were weighed, blood was withdrawn from the tail veins with the animals under isoflurane anesthesia and collected in tubes containing 10 μl EDTA 0.342 mol/l for 500 μl blood. The brain was removed carefully severing the optic and trigeminal nerves and the pituitary stalk (not to tear the pituitary gland), weighed and placed on a cold plate. All brain regions were dissected by a single experimenter (see below). The skull was handed over to a second experimenter in charge of dissecting and weighing the adenohypophysis. The rest of the body was handed to other 2 or 3 experimenters who dissected and collected whole ovaries, a sample of liver tissue, adipose tissue and skin tissue from the distal portion of tails.

[0151] Brain region dissection: Prefrontal cortex, hippocampus, hypothalamus, substantia nigra and cerebellum were rapidly dissected on a cold platform to avoid tissue degradation. After dissection, each tissue sample was immediately placed in a 1.5 ml tube and momentarily immersed in liquid nitrogen. The brain dissection protocol was as follows. First a frontal coronal cut was made to discard the olfactory bulb, then the cerebellum was detached from the brain and from the medulla oblongata using forceps. To isolate the medial basal hypothalamus (MBH), brains were placed ventral side up and a second coronal cut was made at the center of the median eminence (−3.6 mm referred to bregma). Part of the MBH was taken from the anterior block of the brain and the other part from the posterior block in both cases employing forceps. The hippocampus was dissected from cortex in both hemispheres using forceps. This procedure was also performed on the anterior and posterior blocks, alternatively placing the brain caudal side up and rostral side up. To dissect the substantia nigra, in each hemisphere a 1-mm thick section of tissue was removed from the posterior part of the brain (−4.6 mm referred to bregma) using forceps. Finally, the anterior block was placed dorsal side up, to separate prefrontal cortex. With a sharp scalpel, a cut was made 2 mm from the longitudinal fissure, and another cut was made 5 mm from it. Additionally, two perpendicular cuts were made, 3 mm and 6 mm from the most rostral point, obtaining a 9 mm2 block of prefrontal cortex. This procedure was performed in both hemispheres and the two prefrontal regions collected in a code-labeled tube.

### Human Tissue Samples

[0152] To build the human-rat clock, we analyzed previously generated methylation data from n=1207 human tissue samples (adipose, blood, bone marrow, dermis, epidermis, heart, keratinocytes, fibroblasts, kidney, liver, lung, lymph node, muscle, pituitary, skin, spleen) from individuals whose ages ranged from 0 to 93. The tissue samples came from three sources. Tissue and organ samples from the National NeuroAIDS Tissue Consortium (36). Blood samples from the Cape Town Adolescent Antiretroviral Cohort study (37). Skin and other primary cells provided by Kenneth Raj (38). Ethics approval (IRB #15-001454, IRB #16-000471. IRB #18-000315, IRB #16-002028).

### Practicing the Invention of DNAm Based Biomarkers

[0153] To use the epigenetic biomarker one can typically extract DNA from cells or fluids, e.g. blood cells, whole blood, peripheral blood mononuclear cells, liver tissue, skin. Next, one needs to measure DNA methylation levels in the underlying signature of CpGs (epigenetic markers) that are being used in the mathematical algorithm. The algorithm leads to an estimate of age for each DNA sample.

### Technical Details Surrounding the DNAm Age Estimator

[0154] We developed twelve epigenetic clocks for rats: six “preliminary” version (based on n=503 rat tissues from the training data) and six “final” versions (based on n=553 samples resulting from combining the 503 rat tissues with n=50 tissue samples from untreated rats in the test data).

[0155] The different clocks for rats can be distinguished along several dimensions (tissue type, species, and measure of age). Some clocks apply to all tissues (pan-tissue clocks) while others are tailor-made for specific tissues/organs (brain, blood, liver). The rat pan-tissue clock was trained on all available tissues. The brain clock was trained using DNA samples extracted from whole brain, hippocampus, hypothalamus, neocortex, substantia nigra, cerebellum, and the pituitary gland. The liver and blood clock were trained using the liver and blood samples from the training set, respectively. While the four rat clocks (pan-tissue-, brain-, blood-, and liver clocks) apply only to rats, the human-rat clocks apply to both species. The two human-rat pan-tissue clocks are distinct, by way of measurement parameters. One estimates chronological age (in units of years), while the other estimates relative age, which is the ratio of chronological age to maximum lifespan; with values between 0 and 1. This ratio allows alignment and biologically meaningful comparison between species.

### Penalized Regression Models

[0156] We developed the six different epigenetic clocks for rats by regressing chronological age on all CpGs that are known to map to the genome or Rattus norvegicus. Age was not transformed. We used all tissues for the pan-tissue clock. We restricted the analysis to blood, liver, and brain tissue for the blood, liver, and brain tissue clocks, respectively. Penalized regression models were created with the R function “glmnet” (39). We investigated models produced by both “elastic net” regression (alpha=0.5). The optimal penalty parameters in all cases were determined automatically by using a 10 fold internal cross-validation (cv.glmnet) on the training set. By definition, the alpha value for the elastic net regression was set to 0.5 (midpoint between Ridge and Lasso type regression) and was not optimized for model performance. We performed a cross-validation scheme for arriving at unbiased (or at least less biased) estimates of the accuracy of the different DNAm based age estimators. One type consisted of leaving out a single sample (LOOCV) from the regression, predicting an age for that sample, and iterating over all samples.

### Relative Age Estimation

[0157] To introduce biological meaning into age estimates of rats and humans that have very different lifespan; as well as to overcome the inevitable skewing due to unequal distribution of data points from rats and humans across age range, relative age estimation was made using the formula: Relative age=Age/maxLifespan where the maximum lifespan for rats and humans were set to 3.8 years and 122.5 years, respectively.

### Final Version of Epigenetic Clocks

[0158] The final versions of our epigenetic clocks are meant for future studies of rat tissue samples. These final versions of clocks were developed by combining the original training data (n=503 rat tissues) with the “untreated” samples from the rat test data. Increasing the sample size of the training data leads to a higher accuracy according to a cross validation analysis. Using the final version of the epigenetic clocks, we find that the treatment effects become even more significant especially for the hypothalamus.

### Statistical Methods Used for Building the Clocks

[0159] The final clocks were used by employing a single elastic net regression model analysis (R function glmnet) on the preliminary training set and final training set, respectively. Details can be found in the scientific publication (Horvath et al 2020). We use used Leave-one-out analysis (LOO) using a single lambda value. We chose the following parameters for the glmnet R function (Alpha: 0.5, CV Fold: 10, Lambda choice for Clock: 1 standard error above minimum CV-MSE).

### Covariates and Coefficient Values of the Rat Clocks

[0160] The final rat pan tissue clock is based on 196 CpGs whose coefficient values are specified in the column “Coef.RatPanTissue”. Age transformation=identity, i.e. F(Age)=Age
[0161] The final rat blood clock is based on 51 CpGs whose coefficient values are specified in the column “Coef.RatBlood”. Age transformation=identity, i.e. F(Age)=Age
[0162] The final rat liver clock is based on 46 CpGs whose coefficient values are specified in the column “Coef.RatLiver”. Age transformation=identity, i.e. F(Age)=Age
[0163] The final rat brain clock is based on 108 whose coefficient values are specified in the column “Coef.RatBrain”. Age transformation=identity, i.e. F(Age)=Age
[0164] The final human rat clock for chronological age is based on 701 CpGs whose coefficient values are specified in the column “Coef.HumanRatLogLinearAge”. Age transformation=identity, i.e. F(Age)=LogLinear(Age)
[0165] The final human rat clock for relative age is based on 621 CpGs whose coefficient values are specified in the column “Coef.HumanRatRelativeAge”. Age transformation: relative age. i.e. F(Age)=Age/maxLifespan where the maximum lifespan for rats and humans were set to 3.8 years and 122.5 years, respectively.

[0166] General description of age transformation The human-rat clocks for chronological age used log linear transformations that are similar to those employed for the HUMAN pan tissue (Horvath 2013) (10).

[0167] Thus, the dependent variable, chronological age, was transformed before carrying out an elastic net regression analysis. Toward this end, the function F(x) where the argument is an age estimate.

Note that F Satisfies the Following Desirable Properties: It
[0168] i) is a continuous, monotonically increasing function (which can be inverted),
[0169] ii) has a logarithmic dependence during development
[0170] iii) has a linear dependence on age after development
[0171] iv) is defined for negative ages (i.e. prenatal samples)
[0172] v) it has a continuous first derivative (slope function).

[0173] An elastic net regression model (implemented in the glmnet R function) was used to regress a transformed version of age on the beta values in the training data. The glmnet function requires the user to specify two parameters (alpha and beta). Since I used an elastic net predictor, alpha was set to 0.5. But the lambda value of was chosen by applying a 10 fold cross validation to the training data (via the R function cv glmnet).

[0174] The elastic net regression results in a linear regression model whose coefficients b0, b1, . . . , relate to transformed age as follows

$$F ( chronological age ) = b 0 + b 1 CpG 1 + … + bpCpGp + error$$

[0175] Note that the intercept term is denoted by b0.

[0176] Based, on the coefficient values from the regression model, DNAmAge is estimated as follows

$$DNAmAge = {F}^{⋀} ( - 1 ) ( b 0 + b 1 CpG 1 + … + bpCpGp )$$

where F\hat{ }(−1) (y) denotes the mathematical inverse of the function F(·). Thus, the regression model can be used to predict to transformed age value by simply plugging the beta values of the selected CpGs into the formula.

### Defining Properties of the Log Linear Transformation

[0177] As indicated by its name, the “log-linear” function, has a logarithmic dependence on age before the average age of sexual maturity (of the species) and a linear dependence after Age at Sexual Maturity (of the species). For the human-rat clocks we used the following averages at sexual maturity (in units of years): 13.5 years for humans and 0.219178082191781 years for rats.

### Construction

[0178] We used a piecewise transformation, parameterized by Age of Sexual Maturity (A).

[0179] The transformation is F(x), given by

$$F ( x ) = g ( \frac{x + 1.5}{A + 1.5} ) where g ( t ) = \{ \begin{matrix}log ( t ) , & for 0 \leq t \leq 1 \\ t - 1 , & for 1 \leq t\end{matrix}$$

[0180] Explicitly, F(x) is given by

$$F ( x ) = \{ \begin{matrix}log ( \frac{x + 1.5}{A + 1.5} ) , & for 0 \leq x \leq A \\ \frac{x - A}{A + 1.5} , & for A \leq x\end{matrix}$$

[0181] In order to use this transformation to predict Age on new samples, one needs to use the inverse transformation, F⁻¹(y), given by

$$F \text{?} ( y ) = \{ \begin{matrix}( A + 1.5 ) \text{?} exp ( y ) - 1.5 , for y < 0 \\ ( A + 1.5 ) y + A , for y \geq 0\end{matrix} \\ \text{?} \text{indicates text missing or illegible when filed}$$

[0182] For predicting age, you will apply the inverse transformation to coefficient-weighted sum.

[0183] That is,

$$DNAmAge = {F}^{-} \text{?} ( x * β ) \\ \text{?} \text{indicates text missing or illegible when filed} \\$$

where β is the vector of coefficients and x is the vector of methylation values, with an intercept term.

### The DNAm Age Estimate is Estimated in Two Steps.

[0184] First, one forms a weighted linear combination of the CpGs.

[0185] The weights used in this linear combination can be specified in the respective column entitled “Coef.”.

[0186] The formula assumes that the DNA methylation data measure “beta” values but the formula could be adapted to other ways of generating DNA methylation data.

[0187] Second, the weighted average of the CpGs is transformed using a monotonically increasing function so that it is in units of years.

$$DNAmAge = F \hat{} ( - 1 ) ( WeightedAverage )$$

[0188] A novel aspect of the above-noted invention is the development of epigenetic biomarkers that apply to two species (rats and humans) at the same time. A single mathematical formulas based on the same methylation probes can be used to measure age in both species based on any tissue sample (i.e. these are pan tissue clocks). The fact these epigenetic biomarkers apply to both species greatly increases the likelihood that findings from preclinical studies in rats will actually translate to humans.

[0189] One of the human-rat clocks measures relative age (defined as ratio of age by maximum lifespan). This clock puts both species on the same footing. The relative age of 0.5 corresponds to 61 years in humans (half of 122 years) and 1.9 years in rats (half of 3.8 years).

[0190] While there are several published clocks for mice and humans, these are the first epigenetic clocks for rats that I am aware of.

[0191] Novel “biomarkers of aging”, i.e assessments that allow one to measure age, are interesting to gerontologists (aging researchers), anti-aging researchers, pharmaceutical companies that carry out preclinical studies.

[0192] Overall, we expect that these epigenetic biomarkers will become useful biomarkers for preclinical studies using rats because they capture the physiological aging state, thus allowing efficacy of interventions to be evaluated based on real-time measures of aging, rather than relying on long-term outcomes, such as morbidity and mortality.

[0193] Finally, this measure may be another component of other molecular biomarkers of aging.

### Competitive Advantage

[0194] In summary, the invention provides novel epigenetic biomarker of aging. Strikingly, some of these biomarkers apply to two species: rats and humans.

[0195] It is critical to distinguish molecular biomarkers such as DNAm Age from clinical biomarkers of aging. Clinical biomarkers such as lipid levels, blood pressure, blood cell counts have a long and successful history in clinical practice. By contrast, molecular biomarkers of aging are rarely used. However, this is likely to change due to recent breakthroughs in DNA methylation based biomarkers of aging. DNA methylation (DNAm) based biomarkers of aging promise to greatly enhance biomedical research, clinical applications, and preclinical studies. They will also be more useful for preclinical studies and intervention assessment that target aging, since they are more proximal to the biological changes that characterize the aging process compared to upstream clinical read outs of health and disease status.

[0196] While these DNAm based biomarkers will probably not replace traditional biomarker assessments, they provide complementary information that adds valuable information, with preclinical applications.

### REFERENCES

[0197] 1. Ferrucci L, Gonzalez-Freire M, Fabbri E, Simonsick E. Tanaka T, Moore Z, Salimi S, Sicrra F, de Cabo R: Measuring biological aging in humans: A quest. Aging Cell 2020, 19:e13080.
[0198] 2. Sen P, Shah P P, Nativio R, Berger S L: Epigenetic Mechanisms of Longevity and Aging. Cell 2016, 166:822-839.
[0199] 3. Kane A E, Sinclair D A: Epigenetic changes during aging and their reprogramming potential. Critical Reviews in Biochemistry and Molecular Biology 2019, 54:61-83.
[0200] 4. Zhang W, Qu J. Liu G H, Belmonte J C I: The ageing epigenome and its rejuvenation. Nature Reviews Molecular Cell Biology 2020, 21:137-150.
[0201] 5. Rando T A, Chang H Y: Aging, rejuvenation, and epigenetic reprogramming: resetting the aging clock. Cell 2012, 148:46-57.
[0202] 6. López-Otin C, Blasco M A, Partridge L, Serrano M, Kroemer G: The hallmarks of aging. Cell 2013, 153:1194-1217.
[0203] 7. Bocklandt S, Lin W, Sehl M E, Sanchez F J, Sinsheimer J S, Horvath S, Vilain E: Epigenetic predictor of age. PLoS One 2011, 6:e14821.
[0204] 8. Garagnani P. Bacalini M G, Pirazzini C. Gori D. Giuliani C, Man D, Di Blasio A M, Gentilini D, Vitale G, Collino S, et al: Methylation of ELOVL2 gene as a new epigenetic marker of age. Aging Cell 2012, 11:1132-1134.
[0205] 9. Hannum G, Guinney J, Zhao L, Zhang L, Hughes G, Sadda S, Klotzle B, Bibikova M, Fan J B, Gao Y, et al: Genome-wide methylation profiles reveal quantitative views of human aging rates. Mol Cell 2013, 49:359-367.
[0206] 10. Horvath S: DNA methylation age of human tissues and cell types. Genome Biol 2013, 14:R115.
[0207] 11. Lin Q. Weidner C I, Costa I G, Marioni R E, Ferreira M R, Deary I J, Wagner W: DNA methylation levels at individual age-associated CpG sites can be indicative for life expectancy. Aging (Albany NY) 2016, 8:394-401.
[0208] 12. Horvath S, Raj K: DNA methylation-based biomarkers and the epigenetic clock theory of ageing. Nat Rev Genet 2018.
[0209] 13. Marioni R, Shah S, McRae A. Chen B, Colicino E. Harris S, Gibson J, Henders A. Redmond P, Cox S, et al: DNA methylation age of blood predicts all-cause mortality in later life. Genome Biol 2015, 16:25.
[0210] 14. Chen B H, Marioni R E, Colicino E. Peters M J, Ward-Caviness C K. Tsai P C, Roetker N S, Just A C, Demerath E W, Guan W, et al: DNA methylation-based measures of biological age: meta-analysis predicting time to death. Aging (Albany NY) 2016, 8:1844-1865.
[0211] 15. Horvath S. Pirazzini C, Bacalini M G. Gentilini D, Di Blasio A M, Delledonne M, Mari D, Arosio B, Monti D, Passarino G, et al: Decreased epigenetic age of PBMCs from Italian semi-supercentenarians and their offspring. Aging (Albany NY) 2015, 7:1159-1170.
[0212] 16. Marioni R E, Shah S, McRae A F, Ritchie S J, Muniz-Terrera G, Harris S E, Gibson J, Redmond P. Cox S R, Pattie A, et al: The epigenetic clock is correlated with physical and cognitive fitness in the Lothian Birth Cohort 1936. Int J Epidemiol 2015, 44:1388-1396.
[0213] 17. Horvath S, Mah V. Lu A T, Woo J S, Choi O W, Jasinska A J, Riancho J A, Tung S. Coles N S, Braun J, et al: The cerebellum ages slowly according to the epigenetic clock. Aging (Albany NY) 2015, 7:294-306.
[0214] 18. Horvath S, Garagnani P, Bacalini M G, Pirazzini C, Salvioli S, Gentilini D, Di Blasio A M, Giuliani C, Tung S, Vinters H V. Franceschi C: Accelerated epigenetic aging in Down syndrome. Aging Cell 2015, 14:491-495.
[0215] 19. Horvath S, Levine A J: HIV-1 Infection Accelerates Age According to the Epigenetic Clock. J Infect Dis 2015, 212:1563-1573.
[0216] 20. Horvath S, Erhart W, Brosch M, Ammerpohl O, von Schonfels W. Ahrens M. Heits N, Bell J T, Tsai P C, Spector T D, et al: Obesity accelerates epigenetic aging of human liver. Proc Natl Acad Sci USA 2014, 111:15538-15543.
[0217] 21. Levine M E, Lu A T, Chen B H, Hernandez D G. Singleton A B, Ferrucci L. Bandinelli S, Salfati E. Manson J E, Quach A, et al: Menopause accelerates biological aging. Proc Natl Acad Sci USA 2016, 113:9327-9332.
[0218] 22. Petkovich D A, Podolskiy D I, Lobanov A V, Lee S G, Miller R A, Gladyshev V N: Using DNA Methylation Profiling to Evaluate Biological Age and Longevity Interventions. Cell Metab 2017, 25:954-960 e956.
[0219] 23. Cole J J, Robertson N A, Rather M I, Thomson J P, McBryan T, Sproul D, Wang T, Brock C, Clark W, Ideker T. et al: Diverse interventions that extend mouse lifespan suppress shared age-associated epigenetic changes at critical gene regulatory regions. Genome Biol 2017, 18:58.
[0220] 24. Wang T, Tsui B, Kreisberg J F, Robertson N A, Gross A M, Yu M K, Carter H, Brown-Borg H M, Adams P D, Ideker T: Epigenetic aging signatures in mice livers are slowed by dwarfism, caloric restriction and rapamycin treatment. Genome Biol 2017, 18:57.
[0221] 25. Stubbs T M, Bonder M J, Stark A K, Krueger F, von Meyenn F. Stegle O, Reik W: Multi-tissue DNA methylation age predictor in mouse. Genome Biol 2017, 18:68.
[0222] 26. Thompson M J, Chwialkowska K, Rubbi L, Lusis A J, Davis R C, Srivastava A. Korstanje R. Churchill G A, Horvath S, Pellegrini M: A multi-tissue full lifespan epigenetic clock for mice. Aging (Albany NY) 2018, 10:2832-2854.
[0223] 27. Meer M V. Podolskiy D I, Tyshkovskiy A, Gladyshev V N: A whole lifespan mouse multi-tissue DNA methylation clock. eLife 2018, 7:e40675.
[0224] 28. Fahy G M, Brooke R T, Watson J P, Good Z, Vasanawala S S, Maecker H. Leipold M D, Lin D T S, Kobor M S, Horvath S: Reversal of epigenetic aging and immunosenescent trends in humans. Aging Cell 2019, 18:e13028.
[0225] 29. Hannum G: Genome-wide methylation profiles reveal quantitative views of human aging rates. Mol Cell 2013, 49.
[0226] 30. Lin Q. Weidner C I, Costa I G, Marioni R E, Ferreira M R P, Deary I J: DNA methylation levels at individual age-associated CpG sites can be indicative for life expectancy. Aging 2016, 8:394-401.
[0227] 31. Horvath S: DNA methylation age of human tissues and cell types. Genome Biol 2013. 14.
[0228] 32. Horvath S. Oshima J, Martin G M, Lu A T, Quach A. Cohen H, Felton S, Matsuyama M, Lowe D. Kabacik S, et al: Epigenetic clock for skin and blood cells applied to Hutchinson Gilford Progeria Syndrome and ex vivo studies. Aging (Albany NY) 2018. 10:1758-1775.
[0229] 33. The Bc, Bock C. Halbritter F, Carmona F J, Tierling S, Datlinger P, Assenov Y, Berdasco M, Bergmann A K, Booher K, et al: Quantitative comparison of DNA methylation assays for biomarker development and clinical applications. Nature Biotechnology 2016, 34:726.
[0230] 34. Jylhava J. Pedersen N L, Hagg S: Biological Age Predictors. EBioMedicine 2017, 21:29-36.
[0231] 35. Horvath S. Raj K: DNA methylation-based biomarkers and the epigenetic clock theory of ageing. Nat Rev Genet 2018. 19:371-384.
[0232] 36. Morgello S. Gelman B, Kozlowski P, Vinters H. Masliah E. Comford M, Cavert W, Marra C. Grant I, Singer E: The National NeuroAIDS Tissue Consortium: a new paradigm in brain banking with an emphasis on infectious disease. Neuropathol Appl Neurobiol 2001, 27:326-335.
[0233] 37. Horvath S, Stein D J, Phillips N, Heany S J, Kobor M S, Lin D T S, Myer L, Zar H J, Levine A J, Hoare J: Perinatally acquired HIV infection accelerates epigenetic aging in South African adolescents. AIDS (London, England) 2018, 32:1465-1474.
[0234] 38. Kabacik S, Horvath S, Cohen H, Raj K: Epigenetic ageing is distinct from senescence-mediated ageing and is not prevented by telomerase expression. Aging (Albany NY) 2018, 10:2800-2815.
[0235] 39. Friedman J. Hastie T, Tibshirani R Regularization Paths for Generalized Linear Models via Coordinate Descent. Journal of Statistical Software 2010, 33:1-22.
[0236] 40. Bocklandt S, Lin W. Sehl M E, Sanchez F J, Sinsheimer J S, Horvath S, Vilain E: Epigenetic predictor of age. PLoS One 2011, 6.
[0237] 41. Weidner C I: Aging of blood can be tracked by DNA methylation changes at just three CpG sites. Genome Biol 2014, 15.
[0238] 42. Christiansen L, Lenart A, Tan Q, Vaupel J W, Aviv A, McGue M, Christensen K: DNA methylation age is associated with mortality in a longitudinal Danish twin study. Aging Cell 2015.
[0239] 43. Pema L. Zhang Y. Mons U, Holleczek B. Saum K U, Brenner H: Epigenetic age acceleration predicts cancer, cardiovascular, and all-cause mortality in a German case cohort. Clinical Epigenetics 2016, 8:1-7.

### Example 3: Universal DNA Methylation Age Across Mammalian Tissues

[0240] The references cited in this Example are found at the end of this Example.

[0241] Aging is often perceived as a degenerative process caused by random accrual of cellular damage over time. In spite of this, age can be accurately estimated by epigenetic clocks based on DNA methylation profiles from almost any tissue of the body. Since such pan-tissue epigenetic clocks have been successfully developed for several different species, it is difficult to ignore the likelihood that a defined and shared mechanism instead, underlies the aging process. To address this, we generated 10,000 methylation arrays, each profiling up to 37,000 cytosines in highly-conserved stretches of DNA, from over 59 tissue-types derived from 128 mammalian species. From these, we identified and characterized specific cytosines, whose methylation levels change with age across mammalian species. Genes associated with these cytosines are greatly enriched in mammalian developmental processes and implicated in age-associated diseases. From the methylation profiles of these age-related cytosines, we successfully constructed three highly accurate universal mammalian clocks. The universal clocks for similarly accurate for estimating ages (r>0.95) of any mammalian species and tissue with a single mathematical formula.

[0242] Collectively, these new observations support the notion that aging is indeed evolutionarily conserved and coupled to developmental processes across all mammalian species—a notion that was long-debated without the benefit of this new and compelling evidence.

[0243] Aging is associated with multiple cellular changes that are often tissue-specific. Cytosine methylation however, is unusual in this regard as it is strongly correlated with age across virtually all tissues. This feature can be capitalized upon to develop multivariate age-estimators (pan-tissue epigenetic clocks) that are applicable to most or all tissues of a species. This approach produced the first human pan-tissue clock that was based on 353 age-related CpGs 1. Subsequent successes in developing similar pan-tissue clocks for other species hint at the universality of the aging process. To investigate this, we sought to i) identify and characterize cytosines whose methylation levels change with age in all mammals and ii) develop universal age-estimators that apply to all mammalian species and tissues (universal epigenetic clocks for mammals). Towards these ends, we employed a novel Infinium array (HorvathMammalMethylChip40) that profiles methylation levels of up to 37k CpGs with flanking DNA sequences that are highly-conserved across the mammalian class 2. We obtained such profiles from almost 10,000 samples from 59 tissue types, derived from 128 mammalian species, representing 15 phylogenetic orders with age ranging from prenatal, to 139-years-old (bowhead whale). The species tested had maximum life spans from 3.8 to 211 years and adult weights from 0.004 to 100,000 kilograms.

[0244] To identify age-related CpGs, we carried out two-stage meta-analysis across species and tissues. Cytosines that become increasingly methylated with age (i.e., positively correlated) were found to be more highly conserved (FIG. 6a). From these, we identified 665 age-related CpGs, within a threshold significance of α=10-200 across all eutherian species and tissues (FIG. 6a). Cytosines cg12841266 (P=6.2×10-908) and cg11084334 (P=2.0×10-823), located in exon 2 of the LHFPL4 gene were the most predictive across all species, having a correlation>0.8 in 24 species, of which three are shown in FIG. 6b-d. Another highly-correlated cytosine, cg09710440, resides in LHFPL3 (P=5.1×10-724), a paralog of LHFPL4 (FIG. 6a). As LHFPL4 and LHFPL3 are in human chromosomes 2 and 7 respectively, their age-related gain of methylation is unlikely to be random. It implies instead their involvement in the aging process, even if their activities as nucleators of GABA receptors do not immediately conjure an obvious mechanism. Indeed, methylation of LHFPL4 cg12841266 was strongly correlated with age of multiple mouse tissues in both development (r=0.58 and P=8.9×10-11) and post-development stages (r=0.45 and P=2.3×10-76), particularly in the brain (r=0.92 and P=6.95×10-8), muscle (r=0.89 and P=7.6×10-7), liver (r=0.79 and P=1.9×10-117), and blood (r=0.89 and P=1.0×10-53). Consistent with increased methylation, expression of both LHFPL4 and LHFPL3 declines with increasing age in numerous, albeit not all, human and mouse tissues. In particular, their reduced expression is consistently observed in the brain 3, 4. Importantly, age-related methylation changes in young animals concur strongly with those observed in middle-aged or old animals, excluding the likelihood that the changes are those involved purely in the process of organismal development.

### Meta-Analysis of Age-Related CpGs Across Specific Tissues

[0245] To gain a wider and deeper understanding of age-related CpGs within specific tissues across different species, we focused on 5 organs: brain (whole and cortex), blood, liver, muscle and skin. We performed EWAS meta-analysis on 851 whole brains (17 species), 391 cortices (6 species), 3552 blood (28 species), 1221 liver (9 species), 345 muscle (5 species), and 1452 skin (31 species). Consistently across all tissues, there were more CpG with positive correlations with age than negative ones and most of them were located within CpG islands, which are known to become increasingly methylated with age (FIG. 6f). While many of these cytosines were either specific to individual organs or shared between several organs, 54 potential universal age-related CpGs were shared among all the five organs (FIG. 6e). Strikingly, the overwhelming majority of the 40 genes that are proximal to these 54 CpGs encode transcription factors with homeobox domain, and are involved in developmental processes.

### Functional Enrichment Analysis of Age-Related CpGs

[0246] We employed a pathway enrichment tool (GREAT hypergeometric test based on genomic regions5) to analyze the top 1,000 positively and 1,000 negatively correlated age-related CpGs and their proximal genes in all tissues, individually or collectively, to ascertain whether they are associated with particular biological processes or cellular pathways (FIG. 6g). We demonstrated that our enrichment results are not confounded by the special design of the mammalian methylation array. From positively-correlated CpGs across all tissues, the most enriched (P=3.7×10-207) Gene Ontology term was “nervous system development”, which also appeared prominently in blood (P=4.7×10-230), liver (P=7.6×10-136), muscle (P=1.4×10-12), skin (P=5.4×10-141), brain (P=1.0×10-42) and cortex (P=7.5×10-80). Other top-scoring terms include “pattern specification” and “anatomical structure development”. Evidently, many hypermethylated age-related CpGs in all the five organs may be proximal to development genes. At the molecular level, many of these CpGs are in positions targeted by SUZ12, which is one of the core subunits of polycomb repressive complex 2 (all tissue P=7.1×10-225, blood P=3.9×10-259, liver P=1.7×10-149, muscle P=8.2×10-16, skin P=2.6×10-150, brain P=8.7×10-54, and cerebral cortex P=6.1×10-87); echoing previous human EWAS studies6, 7 EED, another core subunit of PRC2, shows similarly high significant P-values, e.g. P=1.7×10-262 in all tissues. Strong enrichment can also be found in promoters with H3K27me3 modification. These were observed in all tissue (P=2.8×10-266), blood (P=3.9×10-283), liver (P=3.3×10-189), muscle (P=8.7×10-18), skin (P=3.3×10-189), brain (P=3.3×10-68), and cortex (P=5.1×10-116). These results reinforce the association between development and aging.

[0247] This may appear counterintuitive but finds support from the fact that mice with compromised development following ablation of growth hormone receptors (GHRKO), exhibit significant slowing down of their aging process 8. We demonstrated that the universal epigenetic clocks are slowed in cortex, liver, and kidneys from GHRKO mice. Interestingly, although there were 3,617 enrichments of hypermethylated age-related CpGs across all tissues, only 12 were found for hypomethylated ones. The apparent scarcity of the latter is particularly strong in skin, blood, and liver. However, this is not the case for the brain, cortex, and muscle, where there was instead greater enrichment of hypomethylated age-related cytosines; a trend that seemingly parallels the rate of tissue turn-over. The cytosines that were negatively associated with age in brain (P=9.0×10-18, cortex (P=4.0×10-19) and muscle (P=2.5×10-4), are enriched in the circadian rhythm pathway, indicating that besides commonly shared processes of development, which is universally implicated in aging of all tissues, organ-specific ones are also clearly in operation.

[0248] Another relevant observation is the enrichment of negative age-related cytosines in an up-regulated gene set in Alzheimer's disease. This was observed in the whole brain (P=2.1×10-30), the cortex (P=5.9×10-22), and in muscle tissue (P=2.5×10-5). Although this gene set was also enriched in blood (P=1.5×10-6) and all tissues combined (P=1.4×10-4), it was associated with positive age-related CpGs instead indicating that some age-related gene sets can be impacted by negative and positive age-related CpGs, potentially influencing different members of the set or perhaps having opposing transcriptional outcomes resulting from methylation. Another highly-relevant example of this is the observation concerning mitochondrial function. While hypomethylated age-related cytosines in brain, cortex, and muscle are enriched for numerous mitochondria-related genes; in blood and skin, however, these are enriched for positive age-related cytosines.

Overlap of Age-Related Cytosines with Human Traits and Diseases

[0249] To uncover potential correlation between age-related cytosines and known human traits, the proximal genomic regions of the same top 1,000 positively and 1,000 negatively associated CpGs were overlaid with the top 5% of genes that were associated with numerous human traits identified by GWAS. At threshold of P<5.0×10-4, overlaps were found with genes associated with longevity, Alzheimer's, Parkinson's and Huntington's disease, dementia, epigenetic age acceleration, age at menarche, leukocyte telomere length, inflammation, mother's longevity, metabolic diseases, obesity (fat distribution, body-mass index), etc.; many of which are associated with advancing age.

### Development of Universal Pan-Tissue Epigenetic Clocks of Age Across Mammals

[0250] Having identified age-related cytosines shared across mammalian species and tissues, we proceeded to use them to develop universal mammalian epigenetic age clocks. We developed three universal mammalian age-estimators, which differ with respect to output. The first, universal naïve clock (Clock 1) directly correlates DNA methylation profile to chronological age. To allow biologically meaningful comparisons between species with very different life-spans, we developed a second universal clock that defines individual age relative to the maximum lifespan of its species: generating relative age estimates between 0 and 1. As the accuracy of this universal relative age clock (Clock 2) could be compromised in species for which knowledge of maximum lifespan is unavailable, a third universal clock was developed, which omits maximum lifespan and uses instead average age at sexual maturity. Age at sexual maturity was chosen as species characteristics since it correlates strongly with maximum lifespan on the log scale (Pearson correlation r=0.82, p=6×10-183 across all mammalian species in AnAge). This third clock is referred to as the universal log-linear transformed age clock (Clock 3).

### Performance of Universal Epigenetic Clocks Across Species

[0251] We employed two different strategies for evaluating the accuracy of the clocks. First, leave-one-fraction-out (LOFO) cross-validation analysis randomly divided the data set into 10 fractions, each of which contained the same proportions of species and tissue types, and a different fraction is left out for validation at each iteration of analysis. Second, leave-one-species-out analysis (LOSO) was similarly cross-validated with the omission of a species at each iteration.

[0252] According to LOFO cross-validation, the epigenetic clocks were remarkably accurate (r>0.96), with a median error of less than 1 year and a median relative error of less 3.7 percent (FIGS. 7a, 8a-b). According to the LOSO evaluation, the clocks reached age correlations up to r=0.94. The median correlation (and MAE) across species was as strong with either LOFO or LOSO evaluations. For some species such as bowhead whales, however, epigenetic age as predicted by the naïve clock accords poorly with chronological age (FIG. 7b). We investigated and ascertained that the mean difference between LOSO DNAmAge and chronological age is negatively correlated with maximum lifespan (r=−0.57, p=3×10-6) and age at sexual maturity (r=−0.5, p=6.4×10-5) of the species (FIG. 7c-d). Here, the strength of clock 2 comes to fore as it is not affected by maximum lifespan, which was incorporated into it during its construction. Clock 2 and clock 3 achieve a correlation of r=0.96 and r=0.93 between DNAm and observed transformed age, respectively (FIG. 8d,e). Both of these clocks present comparably accurate LOFO estimates in numerous tissue types in 58 species, with a representation in FIG. 8g-i of LOFO Clock 2 correlations for humans (r=0.961, 19 tissues), mice (r=0.954, 25 tissues), and bottlenose dolphins (r=0.95, 2 tissues). While the clock accurately predicted the age for one mysticete species, the humpback whale and all other mammalian species, the ages of bowhead samples were sometimes underestimated (species index 3.11 in FIG. 5a, b). This may simply reflect the inaccuracy of the age estimations used for bowhead whales, which were aged using the aspartic acid racemization rate. These clocks are similarly accurate with LOSO age-estimates between evolutionarily distant species including dogs (r=0.917, MAE=1.3), Savanna elephants (r=0.962, MAE<3 years), and flying foxes (r=0.982, MAE=1.2) (FIG. 8j-l). Such high predictive accuracy of LOSO analysis demonstrates that these universal clocks are applicable to mammalian species that are not part of the training data. The three universal clocks performed just as well in 63 species, for which there were fewer than 15 samples (r˜0.9, MAE˜1 year), showing very strong correlation between estimated and actual relative age (r=0.92).

[0253] With regards to marsupials, we encountered two limitations. First, less than half of the eutherian CpGs apply to marsupials 2. Second, there were only seven marsupial species in our data set with total sample size N=162. These limitations notwithstanding, we were still able to construct a fourth universal clock for estimating relative age in marsupials (age correlation, r=0.88, med.Cor=0.87 in FIG. 8c,f).

### Performance of Universal Epigenetic Clocks Across Tissues

[0254] As the epigenome landscape vanes markedly across tissue types 9, 10, we assessed tissue-specific accuracy of clock 2 for relative age (r=0.96, FIG. 8d). Of the 33 distinct tissue types, the median correlation is 0.94 and median MAE for relative age is 0.026. There was high age-correlation with whole brain (r=0.987), cortex (r=0.972), hippocampus (r=t 964), striatum (r=0.956), cerebellum (r=0.975), spleen (r=0.981), and kidney (r=0.979) (FIG. 9). Blood and skin also exhibited similarly high estimates of relative age correlations across different species: blood (r=0.958, MAE=0.018, 74 species) and skin (r=0.948, MAE=0.026, 56 species) (FIG. 9i,n).

[0255] The universality of aging across all mammalian species has engendered speculations of its cause, with the predominant notion that random damage to cellular constituents underlies this process. The ability to accurately estimate ages of mammals by virtue of their methylation profiles however, introduces the likelihood of a largely deterministic process.

[0256] We investigated this question by generating an unprecedentedly large set of DNA methylation profiles from over 121 eutherian species and 7 marsupial species, from which an unambiguous feature emerged. Genes that are proximal to age-related CpGs, overwhelmingly represent those involved in the process of development, such as HOX and PAX. This is consistent with enrichment of these cytosines in target sites of PRC2 and bivalent chromatin domains, which control expression of HOX and other developmental genes in all vertebrates and beyond. It appears therefore, that aging is hard-wired into life through processes associated with development.

[0257] A large body of literature connects growth/development to aging starting with the seminal work by Williams 1957 11 and a recent study by de Magalhacs12. This connection is also apparent when Yamanaka factor-mediated reversion of adult cells to embryonic stem cells is accompanied by resetting of their age to prenatal epigenetic age, matching their development stage 1. Therefore, methylation regulation of the genes involved in development (during and after the developmental period) may constitute a key mechanism linking growth and aging. The universal epigenetic clocks demonstrate that aging and development are coupled and share important mechanistic processes that operate over the entire lifespan of an organism.

[0258] Other notable age-related genes and processes that were uncovered include LHFPL4 and LHFPL3 whose reported function in synaptic clustering of GABA receptors does not immediately present an obvious connection to aging across all tissues. However, the extremely strong correlation of CpGs near these paralogues with age argues strongly for their role in the aging process. The LARP1 gene ranks first in liver and second across all tissues for hypomethylation with age and encodes a protein that regulates translation of downstream targets of mTOR13, which has very well-documented links with aging and longevity. The implication of circadian rhythm genes, exclusively in aging brain tissues, reveals tissue-specific changes that occur in parallel with universal developmental ones. Furthermore, involvement of circadian rhythm genes in aging echoes recent observations in mice 4.

[0259] The implication of multiple genes related to mitochondrial function supports the long-argued importance of this organelle in the aging process. It is also important to note that many of the identified genes are implicated in a host of age-related pathologies and conditions, bolstering the likelihood of their active participation in, as opposed to passive association with, the aging process.

[0260] Future elucidation of how development is mechanistically connected to aging will be aided by the universal mammalian clocks. The leave-one-species-out cross validation analysis demonstrates that these clocks generalize very well to mammalian species that were not part of the training set. The ability to construct universal mammalian epigenetic clocks that can accurately predict the age of animals and tissues that were not part of the training set fulfils Popper's dictum of falsifiability, which requires that a theory make testable predictions on the basis of which it can be refuted. The epigenetic clocks presented here, built on the universality of mammalian aging, pass this test with remarkable ease and accuracy.

### Methods

### Tissue Samples

### Quality Controls for Establishing Universal Clocks

[0261] We generated two variables to guide the quality control (QC) of the study samples: the first being a variable indicating the confidence (0 to 100%) in the chronological age estimate of the sample. For example, a low confidence was assigned to samples from wild animals whose ages were estimated based on body length measurements. The epigenetic clocks were trained and evaluated in tissue samples whose confidence exceeded 90% (>=90%). The second quality control variable was an indicator variable (yes/no) that flagged technical outliers or malignant (cancer) tissue. Since we were interested in “normal” aging patterns we excluded tissues from preclinical studies surrounding anti-aging or pro-aging interventions.

### Species Characteristics

[0262] Species characteristics such as maximum lifespan (maximum observed age), age at sexual maturity, and gestational length were obtained from an updated version of the Animal Aging and Longevity Database 14 (AnAge, http://genomics.senescence.info/help.html#anage).

### Meta Analysis for EWAS of Age

[0263] We carried out two methods to combine EWAS results across species and tissues, as described below.

Two-Stage Meta Analysis in Conjunction with Stouffer's Method

[0264] Our meta analysis of age combined correlation test statistics calculated in 133 different species-tissue strata (from 58 species) with a minimal sample size of 15 (N≥15). In the first stage, we combined the EWAS results across tissues within the same species to form species specific meta-EWAS results. In the second stage, we combined the total of 58 species EWAS results to form a final meta-EWAS of age. All the meta analyses in both stages were performed by the unweighted Stouffer's method, as conducted in METAL15.

### Stratification of Age Groups

[0265] To assess whether the age related CpGs in young animals relate to those in old animals, we split the data into 3 age groups: young age (age<1.5*age at sexual maturity, ASM), middle age (age between 1.5 and 3.5 ASM), and old age group (age≥3.5 ASM). The threshold of sample size in species-tissue was relaxed to N≥10. The age correlations in each age group were meta analyzed using the above mentioned two-stage meta analysis approach.

### Brain EWAS

[0266] Analogously, we applied the two approaches to brain EWAS results; more than 900 brain tissues from human, vervet monkey, mice, olive bamboo, brown rat, and pig species across cerebellum, cortex, hippocampus, hypothalamus, striatum, subventricular zone (SVZ), and whole brain.

### EWAS of Single Tissue

[0267] One-stage unweighted Stouffer's method and Median Z score were also applied to EWAS results from cerebellum and cortex, respectively. Similarly, we carried out meta-analysis EWAS of blood, liver, muscle, and skin. Blood EWAS results were combined across 7 families including 367 tissues from humans, 565 from dogs, 170 from mice, 36 from killer whales, 137 from bottlenose dolphins, 83 from Asian elephants, etc. Skin EWAS results were combined across 5 families including 95 from bowhead whales, 638 tissues from 19 bat species, 180 from killer whales, 105 from naked mole rats, 72 from humans, etc. Liver EWAS results were combined across four families including 583 mice, 97 from humans, 48 from horses, etc. Muscle EWAS results were combined across four families including 24 from evening bats, 57 from humans, and 19 from naked mole rats, etc. Cerebellum EWAS results were combined across Primates and Rodentia including 46 from humans. Another 46 cerebral cortex tissues profiled in the same human individuals were included in the cortex EWAS, in which the meta analysis was also combined across Primates, Rodentia, and a third Order: 16 pigs from Artiodactyla. 5.

We used the R gmirror function to depict mirror image Manhattan plots.

### GREAT Analysis

[0268] We applied the GREAT analysis software tool6 to the top 1000 hypermethylated and the top 1000 hypomethylated CpGs from EWAS of age. GREAT implemented foreground/background hypergeometric tests over genomic regions where we input all of the 37k CpG regions of our mammalian array as background and the genomic regions of the 1000 CpGs as foreground. This yielded hypergeometric p-values not confounded by the number of CpGs within a gene. We performed the enrichment based on the settings (assembly: Hg19, Proximal: 5.0 kb upstream, 1.0 kb downstream, plus Distal: up to 50 kb) for about 76,290 gene sets associated with GO terms, MSigDB (including gene sets for upstream regulators), PANTHER, KEGG pathway, disease ontology, gene ontology, human and mouse phenotypes. We report the gene sets with FDR<0.05 and list nominal hypergeometric P-values, FDR and Bonferroni corrected P-values.

### EWAS-GWAS Based Overlap Analysis

[0269] Our EWAS-GWAS based overlap analysis related the gene sets found by our EWAS of age with the gene sets found by published large-scale GWAS of various phenotypes, across body fat distribution, lipid panel outcomes, metabolic outcomes, neurological diseases, six DNAm based biomarkers, and other age-related traits. A total of 69 GWAS results were studied. The six DNAm biomarkers included four epigenetic age acceleration measures derived from 1) Horvath's pan-tissue epigenetic age adjusted for age-related blood cell counts referred to as intrinsic epigenetic age acceleration (IEAA) 1, 16, 2) Hannum's blood-based DNAm age17; 3) DNAmPhenoAge 18; and 4) the mortality risk estimator DNAmGrimAge 19, along with DNAm based estimates of blood cell counts and plasminogen activator inhibitor 1 (PAI1) levels19. For each GWAS result, we used the MAGENTA software to calculate an overall GWAS P-value per gene, which is based on the most significant SNP association P-value within the gene boundary (+/−50 kb) adjusted for gene size, number of SNPs per kb, and other potential confounders 20. We pruned in the genomic regions of GWAS genes present in the mammalian array. For each EWAS results, we studied the genomic regions from the top 1000 CpGs hypermethylated and hypomethylated with age, respectively. To assess the overlap with a test trait, we selected the top 5% genes for each GWAS trait and calculated one-sided hypergeometric P values based on genomic regions (as detailed in 21, 22). The number of background genomic regions in the hypergeometric test was based on the overlap between the entire genes in a GWAS and the entire genomic regions in our mammalian array. We highlighted the GWAS trait when its hypergeometric P value reached 5×10-4 with EWAS of age in any tissue type.

[0270] Association of LHFPL gene expression with chronological age in human and mouse To study if LHFPL4 or LHFPL3 play a role in age-related transcriptional changes surrounding nearby genes, we analyzed several transcriptomic data across multiple tissues and species. In humans, our analysis leveraged gene expression studies from 1) GTEx project, 2) two gene expression data studied in 21 (GEO datasets from studies 23, 24) and 3) the summary data across three studies in Isildak et al.³ for investigating age-related brain expression in developmental (age<20) and aging (age≥20) periods. In mice, we analyzed the summary data from The Tabula Muris Consortium 4 which generated single cell RNA seq data from 23 mouse tissues across the lifespan.

### Three Universal Mammalian Clocks for Eutherians

[0271] We applied elastic net regression models to establish three universal mammalian clocks for estimating chronological age across all tissues in eutherians. The three elastic net regression models corresponded to different outcome measures described in the following: 1) log transformed chronological age: log(Age+2) where an offset of 2 years was added to avoid negative numbers in case of prenatal samples, 2) −log(−log(RelativeAge)) and 3) log-linear transformed age. DNAm age estimates of each clock were computed via the respective inverse transformation. Age transformations used for building universal clocks 2-4 incorporated three species characteristics: gestational time (GT), age at sexual maturity (ASM), and maximum lifespan (maxAge). All of these species variables surrounding time are measured in units of years.

### Loglog Transformation of Relative Age for Clock 2

[0272] Our measure of relative age leverages gestation time (GestationT) and maximum lifespan. We define relative age (RelativeAge) and apply Log-log transformation as the following:

$$RelativeAge = \frac{Age + GestationT}{MaxAge + GestationT} \qquad ( 1 )$$

$$LoglogAge = - log ( - log ( RealtiveAge ) ) \qquad ( 2 )$$

[0273] By definition, RelativeAge is between 0 to 1 and loglogAge is positively correlated with age. Universal clock 2 predicts LoglogAge and next applies an inverse transformation to estimate DNAmAge:

$$DNAmAge = exp ( - exp ( - LoglogAge ) ) * ( MaxAge + GestationT ) - GestationT \qquad ( 3 )$$

[0274] All species characteristics (e.g. MaxAge, gestational time) come from our updated version of AnAge. We were concerned that the uneven evidence surrounding the maximum age of different species could bias our analysis. While billions of people have been evaluated for estimating the maximum age of humans (122.5 years), the same cannot be said for any other species. To address this concern, we made the following admittedly ad-hoc assumption: the true maximum age of non-human species is 30% higher than that reported in AnAge. Therefore, we multiplied the reported maximum lifespan of non-human species by 1.3. Our predictive models turn out to be highly robust with respect to this assumption (data not shown).

### Transformation Based on Log-Linear Age for Clock 3

[0275]

$$y = f ( x ) = \{ \begin{matrix}x - 1 , x \text{?} 1 \\ log ( x ) , x < 1\end{matrix} \qquad ( 5 )$$

$${f}^{- 1} ( y ) = \{ \begin{matrix}y + 1 , y \geq 0 \\ exp ( y ) , y < 0\end{matrix} \qquad ( 6 )$$

$$\text{?} \text{indicates text missing or illegible when filed}$$

[0276] This transformation ensures continuity and smoothness at the change point x=1. In our study, the argument x is the ratio RelativeAdultAge.

(6)

### Elastic Net Regression

[0277] We applied the elastic net regression models to train all samples that selected 1000 to 2000 CpGs for clocks 1-3 and 30 CpGs for the marsupial clock. To assess the accuracy of the elastic net regression models, we used leave-one-fraction-out (LOFO) and leave one-species-out (LOSO) cross validation. In LOFO, we randomly split the entire dataset into 10 fractions each of which had the same distribution in species and tissue types. Each penalized regression model was trained in 9 fractions but evaluated in the 10th left out fraction. After circling through the 10 fractions, we arrived at LOFO predictions which were subsequently related to the actual values.

The LOSO cross validation approach trained each model on all but one species. The left out species was used a test set. The LOSO approach was used to assess how well the penalized regression models generalize to species that were not part of the training data. To ensure unbiased estimates of accuracy, all aspects of the model fitting (including pre-filtering of the CpG) were only conducted in the training data in both LOFO and LOSO analysis. Elastic net regression in the training data was implemented by setting the glmnet model parameter alpha to 0.5. Ten-fold cross validation in the training data was used to estimate the tuning parameter lambda. For computational reasons, we fitted the glmnet model to the top 4000 CpGs with the most significant median Z score (age correlation test) in the training data. To accommodate different samples sizes of the species we used weighted regression as needed where the weight was the inverse of square root of species frequency or 1/20 (whichever was higher). The final versions of the different universal clocks used all available data.

### Statistics for Performance of Model Prediction

[0278] To validate our model, we used DNAm age estimates from LOFO and LOSO analysis, respectively. At each type of estimates, we performed Pearson correlation coefficients and computed median absolute error (MAE) between DNAm based and observed variables across all samples. Correlation and MAE were also computed at species level, limited to the subgroup with samples N≥=15 (within a species or within a species-tissue category). We reported the medians for the correlation estimates (med.Cor) and the medians for the MAE estimates (med.MAE) across species, respectively. Analogously, we repeated the same analysis at species-tissue level, limited to the subgroup with sampleN>=15 (within a specie-tissue category).

### Covariates and Coefficient Values

[0279] The universal mammalian clock for relative age is based on 783 CpGs whose coefficient values are specified in the column “Coef.UniversalRelativeAge”.

[0280] The universal mammalian clock for log linear age is based on 724 CpGs whose coefficient values are specified in the column “Coef.UniversalLogLinearAge”. The DNAm Age estimate is estimated in two steps.

[0281] First, one forms a weighted linear combination of the CpGs.

[0282] The table reports the probe identifier (cg number) used in the custom Infinium array (HorvathMammalMethylChip40). The weights used in this linear combination can be specified in the respective column entitled “Coef.”. The formula assumes that the DNA methylation data measure “beta” values but the formula could be adapted to other ways of generating DNA methylation data.

[0283] Second, the weighted average of the CpGs is transformed using a monotonically increasing function F so that it is in units of years.

DNAmAge=F(WeightedAverage).

[0284] For universal clock 2 for relative age, the function F is given by the following R code

```
F=function(y,y.maxAge,y.gestation){
  x0=exp(−exp(−y))
  x1=x0*(y.maxAge+y.gestation)
  x=x1−y.gestation
  x
}
```

[0285] For universal clock 3 for log linear age, the function F is given by the following R code

$$F = function ( y . pred , \text{} m \text{} 1 ) \text{} \{ ifelse ( \text{} y . pred < 0 , \text{} ( exp ( y . pred ) - 1 ) * m 1 + m 1 , y . pred * m 1 + m 1 ) \}$$

[0286] Availability of the epigenetic maximum lifespan predictor will usher in a new era of interventional studies that aim to extend the maximum lifespan of a species as a whole.

[0287] Novel “biomarkers of aging”, i.e. assessments that allow one to measure age, are interesting to gerontologists (aging researchers), anti-aging researchers, pharmaceutical companies that carry out preclinical studies.

[0288] Finally, this measure may be another component of other molecular biomarkers of aging.

[0289] In summary, the invention provides novel epigenetic biomarker of aging. While these DNAm based biomarkers will probably not replace traditional biomarker assessments, they provide complementary information that adds valuable information, with clinical/preclinical applications.

### REFERENCES

[0290] 1. Bocklandt S, Lin W, Sehl M E, Sanchez F J, Sinsheimer J S, Horvath S, Vilain E: Epigenetic predictor of age. PLoS One 2011, 6.
[0291] 2. Weidner C I: Aging of blood can be tracked by DNA methylation changes at just three CpG sites. Genome Biol 2014, 15.
[0292] 3. Horvath S: DNA methylation age of human tissues and cell types. Genome Biol 2013, 14:R115.
[0293] 4. Hannum G, Guinney J, Zhao L, Zhang L, Hughes G. Sadda S, Klotzle B, Bibikova M, Fan J B, Gao Y, et al: Genome-wide methylation profiles reveal quantitative views of human aging rates. Mol Cell 2013, 49:359-367.
[0294] 5. Hannum G: Genome-wide methylation profiles reveal quantitative views of human aging rates. Mol Cell 2013, 49.
[0295] 6. Lin Q, Weidner C I, Costa I G, Marioni R E, Ferreira M R P, Deary I J: DNA methylation levels at individual age-associated CpG sites can be indicative for life expectancy. Aging 2016, 8:394-401.
[0296] 7. Marioni R, Shah S, McRae A, Chen B, Colicino E. Harris S, Gibson J, Henders A. Redmond P, Cox S, et al: DNA methylation age of blood predicts all-cause mortality in later life. Genome Biol 2015, 16:25.
[0297] 8. Christiansen L, Lenart A. Tan Q, Vaupel J W, Aviv A, McGue M. Christensen K: DNA methylation age is associated with mortality in a longitudinal Danish twin study. Aging Cell 2015.
[0298] 9. Pema L, Zhang Y, Mons U. Holleczek B, Saum K U, Brenner H: Epigenetic age acceleration predicts cancer, cardiovascular, and all-cause mortality in a German case cohort. Clinical Epigenetics 2016, 8:1-7.

### Example 4: Epigenetic Clocks for Mice and Humans

[0299] The references cited in this Example are found at the end of this Example.

[0300] Age can be accurately estimated by epigenetic clocks based on DNA methylation profiles from almost any tissue of the body. Such pan-tissue epigenetic clocks have been successfully developed for several different species including mice. However, it is not yet known whether one can develop an epigenetic clock for mice that also applies to humans.

[0301] Here we present a dual species epigenetic clock for mice and humans based on methylation levels in cytosines that are highly conserved in mammals. The human mouse epigenetic clock allows one to estimate the age based on human or mouse DNA with a single mathematical formula.

[0302] A critical step toward crossing the species barrier was the use of a mammalian DNA methylation array that profiled 36 thousand probes that were highly conserved across numerous mammalian species (1).

[0303] We expect that the availability of these clocks and their impressive performance will provide a significant boost to the attractiveness of the mouse as biological model in aging research. The fact this epigenetic biomarker applies to both species greatly increases the likelihood that findings from preclinical studies in mice will translate to humans.

[0304] Beyond their utility, these clocks reveal several salient features with regards to the biology of aging. First, the mouse pan-tissue clock re-affirms the implication of the human pan-tissue clock, which is that aging might be a coordinated biological process that is harmonized throughout the body. Second, the ability to combine these two pan-tissue clocks into a single human-mouse pan-tissue clock attests to the high conservation of the aging process across two evolutionary distant species. Thus a treatment that alters the epigenetic age of mice, as measured using the human-mouse clock is likely to exert similar effects in humans.

[0305] The incorporation of two species with very different lifespans such as mouse and human, raises the inevitable challenge of unequal distribution of data points along the age range. This challenge is addressed by the generation of the human-mouse pan-tissue relative age clock which embeds the estimated age in context of the maximal lifespan recorded for the of the relevant species.

[0306] The development of the mouse epigenetic clocks described here was based on novel DNA methylation data that were derived from many different mouse tissue types.

[0307] We also present clocks for mouse liver, blood, cerebral cortex, fibroblasts, skin, and tails.

### General Background DNA Methylation Based Biomarkers

[0308] DNA based biomarker that changes with age is DNA methylation; specifically of cytosine residues of cytosine-phosphate-guanine dinucleotides (CpGs). Machine teaming-based analyses of these changes generated algorithms, known as epigenetic clocks that use specific CpG methylation levels to accurately estimate age that is referred to as DNA methylation age (DNAm age)(2-5).

[0309] DNAm aging assays are already highly robust and ready for biomarker development; as reported by the BLUEPRINT consortium (6). DNAm based biomarkers are highly promising molecular biomarkers of aging (7, 8).

[0310] Human epigenetic clocks for humans have found many biomedical applications including the measure of age in human clinical trials (9, 10). These clocks provide an estimate of chronological age. The divergence between epigenetic age and calendar age, referred to as epigenetic age acceleration, is associated with increased risk of a host of conditions and pathologies, indicating that epigenetic clocks are associated with biological age. This instigated development of similar clocks for animals including mice. Indeed, numerous mouse epigenetic clocks have since been developed and successfully validated against factors, such as rapamycin, caloric restriction and growth factor ablation, which are all well-characterized in their effects on aging of mice (11-16).

### Results

[0311] FIG. 1 shows Human-mouse epigenetic clock. DNA methylation estimates of a) relative age and b) chronological age in samples from mice and humans. The y-axis reports cross validation estimates of the DNAm based age estimator. The x-axis reports the actual values. Points are labelled by species number (9.1=mouse and 1.1=human) and colored by tissue/cell type. Analysis restricted to c) human samples and d) mouse samples. Each panel reports the Pearson correlation and the median absolute error (MAE) and median values across different tissue types. We analyzed N=1982 mouse tissues and N=1211 human tissues.

### Mouse Tissue Samples

[0312] We analyzed N=1982 mouse tissues (adipose, aorta, blood, bone marrow, whole brain, cerebellum, cerebral cortex, dermis, ear, epidermis, embryonic stem cells, fibroblasts, heart, hematopoietic stem cells, hypothalamus, induced pluripotent stem cells, keratinocytes, kidney, liver, lung, lymph nodes, macrophages from bone marrow, peritoneal macrophages, muscle, pituitary gland, placenta, skin, spleen, striatum, sub ventricular zone, tail.

### Human Tissue Samples

[0313] To build the human-mouse clock, we analyzed previously generated methylation data from n=1211 human tissue samples (adipose, blood, bone marrow, dermis, epidermis, heart, keratinocytes, fibroblasts, kidney, liver, lung, lymph node, muscle, pituitary, skin, spleen) from individuals whose ages ranged from 0 to 93. The tissue samples came from three sources. Tissue and organ samples from the National NeuroAIDS Tissue Consortium (17). Blood samples from the Cape Town Adolescent Antiretroviral Cohort study (18). Skin and other primary cells provided by Kenneth Raj (19). Ethics approval (IRB #15-001454, IRB #16-000471, IRB #18-000315, IRB #16-002028).

### Practicing the Invention of DNAm Based Biomarkers

[0314] To use the epigenetic biomarker one can typically extract DNA from cells or fluids, e.g. blood cells, whole blood, peripheral blood mononuclear cells, liver tissue, skin. Next, one needs to measure DNA methylation levels in the underlying signature of CpGs (epigenetic markers) that are being used in the mathematical algorithm. The algorithm leads to an estimate of age for each DNA sample.

### Technical Details Surrounding the DNAm Age Estimator

[0315] The human mouse clock is based on 448 CpGs. Apart from the human mouse clock, we also developed mouse clocks that only apply to mice. Some clocks apply to all tissues (pan-tissue clock) while others are tailor-made for specific tissues/organs (mouse liver, blood, cerebral cortex, fibroblasts, skin, and tails). We present clocks for liver samples. One that is a particularly accurate measure of chronological age. The other is less accurate but is particularly powerful for detecting the beneficial effect of anti aging interventions such as caloric restriction and growth hormone receptor knockout.

[0316] The mouse pan-tissue clock was trained on all available tissues. The liver and blood clock were trained using the liver and blood samples from the training set, respectively. The mouse clocks can be differentiated in terms of applicability to different tissue types: pan-tissue, liver, blood, cerebral cortex, fibroblasts, skin, and tails.

[0317] The human-mouse pan-tissue clock estimates relative age, which is the ratio of chronological age to maximum lifespan; with values between 0 and 1. This ratio allows alignment and biologically meaningful comparison between species.

### Penalized Regression Models

[0318] We developed the epigenetic clocks for mice by regressing chronological age on all CpGs that are known to map to the genome. Age was not transformed. We used all tissues for the pan-tissue clock. We restricted the analysis to blood, liver, skin tissue for the blood, liver, and skin tissue clocks, respectively. Penalized regression models were created with the R function “glmnet” (20). We investigated models produced by both “elastic net” regression (alpha=0.5). The optimal penalty parameters in all cases were determined automatically by using a 10 fold internal cross-validation (cv.glmnet) on the training set. By definition, the alpha value for the elastic net regression was set to 0.5 (midpoint between Ridge and Lasso type regression) and was not optimized for model performance. We performed a cross-validation scheme for arriving at unbiased (or at least less biased) estimates of the accuracy of the different DNAm based age estimators. One type consisted of leaving out a single sample (LOOCV) from the regression, predicting an age for that sample, and iterating over all samples.

### Relative Age Estimation

[0319] To introduce biological meaning into age estimates of mice and humans that have very different lifespan; as well as to overcome the inevitable skewing due to unequal distribution of data points from mice and humans across age range, relative age estimation was made using the formula: Relative age=Age/maxLifespan where the maximum lifespan for mice and humans were set to 4 years and 122.5 years, respectively. The gestation time for mice and humans was set to 19/365 years and 280/365 years, respectively.

### Statistical Methods Used for Building the Clocks

[0320] An elastic net regression model (implemented in the glmnet R function) was used to regress a transformed version of age on the beta values in the training data. The glmnet function requires the user to specify two parameters (alpha and beta). Since I used an elastic net predictor, alpha was set to 0.5. But the lambda value of was chosen by applying a 10 fold cross validation to the training data (via the R function cv.glmnet).

[0321] The clocks were used by employing a single elastic net regression model analysis (R function glmnet). We chose the following parameters for the glmnet R function (Alpha: 0.5, CV Fold: 10, Lambda choice for Clock based on the minimum cross validation estimate of the mean square error).

### Covariates and Coefficient Values of the Mouse Clocks

[0322] The human mouse clock for relative age is based on 448 CpGs whose coefficient values are specified in the column “Coef.HumanMouseClock”

[0323] The mouse pan tissue clock is based on 393 CpGs whose coefficient values are specified in the column “Coef.MouscPanTissue”.

[0324] The mouse blood clock is based on 112 CpGs whose coefficient values are specified in the column “Coef.MouseBlood”.

[0325] The mouse liver clock is based on 201 CpGs whose coefficient values are specified in the column “CoefMouseLiver”.

[0326] The mouse cerebral cortex clock is based on 104 CpGs whose coefficient values are specified in the column “Coef.MouseCortex”.

[0327] The mouse fibroblast clock is based on 75 CpGs whose coefficient values are specified in the column “Coef.MouseFibroblast”.

[0328] The mouse skin clock is based on 96 CpGs whose coefficient values are specified in the column “Coef.MouseSkin”.

[0329] The mouse tail clock is based on 93 CpGs whose coefficient values are specified in the column “Coef.MouseSkin”.

[0330] The mouse liver clock for interventional studies is based on 106 CpGs whose coefficient values are specified in the column “Coef.MouseLiverInterventions”.

### Age Transformation.

[0331] The elastic net regression results in a linear regression model whose coefficients b0, b1, . . . , relate to transformed age as follows

$$F ( chronological age ) = b 0 + b 1 CpG 1 + … + bpCpGp$$

[0332] Note that the intercept term is denoted by b0.

[0333] Based, on the coefficient values from the regression model. DNAmAge is estimated as follows

$$DNAmAge = F \hat{} ( - 1 ) ( b 0 + b 1 CpG 1 + … + bpCpGp )$$

where F\hat{ }(−1) (y) denotes the mathematical inverse of the function F(·). Thus, the regression model can be used to predict to transformed age value by simply plugging the beta values of the selected CpGs into the formula.

[0334] We used two types of age transformations: one for the human mouse clock, another for the remaining pure mouse clocks.

### Age Transformation for the Human-Mouse Clock

[0335] Our measure of relative age leverages gestation time (GestationT expressed in units of years) and maximum lifespan (in years). We define relative age (RelativeAge) and apply Log-log transformation as the following:

$$RelativeAge = \frac{Age + GestationT}{MaxAge + GestationT} \qquad ( 1 )$$

$$LoglogAge = - log ( - log ( RealtiveAge ) ) \qquad ( 2 )$$

[0336] By definition, RelativeAge is between 0 to 1 and LoglogAge is positively correlated with age. The coefficient values of the Human Mouse clock allow one to predicts loglogAge. To arrive at an age estimate (in units of years) one needs to apply an inverse transformation:

$$DNAmAge = exp ( - exp ( - LoglogAge ) ) * ( MaxAge + GestationT ) - GestationT \qquad ( 3 )$$

[0337] The maximum lifespan for mice and humans were set to 4 years and 122.5 years, respectively. The gestation time for mice and humans was set to 19/365 years and 280/365 years, respectively. These values should be interpreted as mathematical parameters of the formula.

### Age Transformation for the Pure Mouse Clocks

[0338]

$$\underline{F} ( Age ) = \{ \begin{matrix}\frac{Age}{\text{?} + \text{?}} + log ( 1.2 + 0.06 ) - \frac{\text{?}}{\text{?}} , Age > 1.2 \\ log ( Age + 0.06 ) , Age \leq 1.2\end{matrix}$$

$$\text{?} \text{indicates text missing or illegible when filed}$$

[0339] In R software code the transformation and its inverse are given by

```
F= function(x,offset=0.06,adult.age=1.2) {
  y=ifelse(x<=adult.age, log(x+offset),
x/(adult.age+offset) +log(adult.age+offset)−
adult.age/(adult.age+offset) );
  y }
F.inverse= function(x,offset=0.06,adult.age=1.2) {
  ifelse(x<=log(adult.age+offset), exp(x)−offset,
(adult.age +offset)*x− log(adult.age+offset)*(
adult.age+offset) +adult.age) }
```

[0340] The DNAm Age estimate is estimated in two steps.

[0341] First, one forms a weighted linear combination of the CpGs whose details can be found herein.

[0342] The table reports the probe identifier (cg number) used in the custom Infinium array (HorvathMammalMethylChip40) and the corresponding genome coordinates in the mouse. The weights used in this linear combination are specified in the respective column entitled “Coef.”.

[0343] The formula assumes that the DNA methylation data measure “beta” values but the formula could be adapted to other ways of generating DNA methylation data.

[0344] Second, the weighted average of the CpGs is transformed using a monotonically increasing function so that it is in units of years.

$$DNAmAge = F \hat{} ( - 1 ) ( WeightedAverage )$$

[0345] A novel aspect of the above-noted invention is the development of epigenetic biomarkers that apply to two species (mice and humans) at the same time. A single mathematical formulas based on the same methylation probes can be used to measure age in both species based on any tissue sample (i.e. these are pan tissue clocks). The fact these epigenetic biomarkers apply to both species greatly increases the likelihood that findings from preclinical studies in mice will actually translate to humans.

[0346] One of the human-mouse clocks measures relative age (defined as ratio of age by maximum lifespan). This clock puts both species on the same footing. The relative age of 0.5 corresponds to 61 years in humans (half of 122 years) and 1.9 years in mice (half of 3.8 years).

[0347] While there are many published clocks for mice and humans, this is the first clock that applies to both species.

[0348] Novel “biomarkers of aging”, i.e. assessments that allow one to measure age, are interesting to gerontologists (aging researchers), anti-aging researchers, pharmaceutical companies that carry out preclinical studies.

[0349] Overall, we expect that these epigenetic biomarkers will become useful biomarkers for preclinical studies using mice because they capture the physiological aging state, thus allowing efficacy of interventions to be evaluated based on real-time measures of aging, other than relying on long-term outcomes, such as morbidity and mortality.

[0350] Finally, this measure may be another component of other molecular biomarkers of aging.

[0351] In summary, the invention describes novel epigenetic biomarker of aging. Strikingly, some of these biomarkers apply to two species: mice and humans.

[0352] It is critical to distinguish molecular biomarkers such as DNAm Age from clinical biomarkers of aging. Clinical biomarkers such as lipid levels, blood pressure, blood cell counts have a long and successful history in clinical practice. By contrast, molecular biomarkers of aging are rarely used. However, this is likely to change due to recent breakthroughs in DNA methylation based biomarkers of aging. DNA methylation (DNAm) based biomarkers of aging promise to greatly enhance biomedical research, clinical applications, and preclinical studies. They will also be more useful for preclinical studies and intervention assessment that target aging, since they are more proximal to the biological changes that characterize the aging process compared to upstream clinical read outs of health and disease status.

[0353] While these DNAm based biomarkers will probably not replace traditional biomarker assessments, they provide complementary information that adds valuable information, with preclinical applications.

### REFERENCES

[0354] 1. Ameson A, Haghani A, Thompson M J, Pellegrini M, Kwon S B, Vu H, Li C Z, Lu A T, Barnes B, Hansen K D, et al: A mammalian methylation array for profiling methylation levels at conserved sequences. bioRxiv 2021:2021.2001.2007.425637.
[0355] 2. Hannum G: Genome-wide methylation profiles reveal quantitative views of human aging rates. Mol Cell 2013, 49.
[0356] 3. Lin Q, Weidner C I, Costa I G, Marioni R E, Ferreira M R P, Deary I J: DNA methylation levels at individual age-associated CpG sites can be indicative for life expectancy. Aging 2016, 8:394-401.
[0357] 4. Horvath S: DNA methylation age of human tissues and cell types. Genome Biol 2013, 14.
[0358] 5. Horvath S. Oshima J, Martin G M, Lu A T, Quach A. Cohen H, Felton S, Matsuyama M, Lowe D, Kabacik S, et al: Epigenetic clock for skin and blood cells applied to Hutchinson Gilford Progeria Syndrome and ex vivo studies. Aging (Albany NY) 2018, 10:1758-1775.
[0359] 6. The Bc, Bock C, Halbritter F, Carmona F J, Tierling S, Datlinger P, Assenov Y, Berdasco M, Bergmann A K, Booher K, et al: Quantitative companson of DNA methylation assays for biomarker development and clinical applications. Nature Biotechnology 2016, 34:726.
[0360] 7. Jylhava J, Pedersen N L, Hagg S: Biological Age Predictors. EBioMedicine 2017, 21:29-36.
[0361] 8. Horvath S, Raj K: DNA methylation-based biomarkers and the epigenetic clock theory of ageing. Nat Rev Genet 2018, 19:371-384.
[0362] 9. Horvath S, Raj K: DNA methylation-based biomarkers and the epigenetic clock theory of ageing. Nat Rev Genet 2018.
[0363] 10. Fahy G M, Brooke R T, Watson J P, Good Z, Vasanawala S S, Maecker H, Leipold M D, Lin D T S, Kobor M S, Horvath S: Reversal of epigenetic aging and immunosenescent trends in humans. Aging Cell 2019, 18:e13028.
[0364] 11. Petkovich D A, Podolskiy D I, Lobanov A V, Lee S G, Miller R A, Gladyshev V N: Using DNA Methylation Profiling to Evaluate Biological Age and Longevity Interventions. Cell Metab 2017, 25:954-960 e956.
[0365] 12. Cole J J, Robertson N A, Rather M I, Thomson J P, McBryan T, Sproul D, Wang T, Brock C. Clark W, Ideker T, et al: Diverse interventions that extend mouse lifespan suppress shared age-associated epigenetic changes at critical gene regulatory regions. Genome Biol 2017, 18:58.
[0366] 13. Wang T, Tsui B, Kreisberg J F, Robertson N A, Gross A M, Yu M K, Carter H, Brown-Borg H M, Adams P D, Ideker T: Epigenetic aging signatures in mice livers are slowed by dwarfism, calorie restriction and rapamycin treatment. Genome Biol 2017, 18:57.
[0367] 14. Stubbs T M, Bonder M J, Stark A K, Krueger F, von Meyenn F. Stegle O, Reik W: Multi-tissue DNA methylation age predictor in mouse. Genome Biol 2017, 18:68.
[0368] 15. Thompson M J, Chwialkowska K, Rubbi L, Lusis A J, Davis R C, Srivastava A, Korstanje R, Churchill G A, Horvath S. Pellegrini M: A multi-tissue full lifespan epigenetic clock for mice. Aging (Albany NY) 2018, 10:2832-2854.
[0369] 16. Meer M V, Podolskiy D I. Tyshkovskiy A, Gladyshev V N: A whole lifespan mouse multi-tissue DNA methylation clock. eLife 2018, 7:e40675.
[0370] 17. Morgello S, Gelman B. Kozlowski P, Vinters H, Masliah E, Cornford M. Cavert W, Marra C, Grant 1, Singer E: The National NeuroAIDS Tissue Consortium: a new paradigm in brain banking with an emphasis on infectious disease. Neuropathol Appl Neurobiol 2001, 27:326-335.
[0371] 18. Horvath S, Stein D J. Phillips N, Heany S J, Kobor M S, Lin D T S, Myer L, Zar H J, Levine A J, Hoare J: Perinatally acquired HIV infection accelerates cpigenetic aging in South African adolescents. AIDS (London, England) 2018, 32:1465-1474.
[0372] 19. Kabacik S, Horvath S, Cohen H, Raj K: Epigenetic ageing is distinct from senescence-mediated ageing and is not prevented by telomerase expression. Aging (Albany NY) 2018. 10:2800-2815.
[0373] 20. Friedman J. Hastie T, Tibshirani R: Regularization Paths for Generalized Linear Models via Coordinate Descent. Journal of Statistical Software 2010, 33:1-22.
[0374] 21. Bocklandt S. Lin W, Sehl M E, Sanchez F J, Sinsheimer J S, Horvath S, Vilain E: Epigenetic predictor of age. PLoS One 2011, 6.
[0375] 22. Weidner C I: Aging of blood can be tracked by DNA methylation changes at just three CpG sites. Genome Biol 2014, 15.
[0376] 23. Horvath S: DNA methylation age of human tissues and cell types. Genome Biol 2013, 14:R115.
[0377] 24. Hannum G, Guinney J, Zhao L, Zhang L, Hughes G, Sadda S. Klotzle B, Bibikova M. Fan J B, Gao Y, et al: Genome-wide methylation profiles reveal quantitative views of human aging rates. Mol Cell 2013, 49:359-367.
[0378] 25. Marioni R, Shah S, McRae A, Chen B, Colicino E. Harris S, Gibson J, Henders A, Redmond P, Cox S, et al: DNA methylation age of blood predicts all-cause mortality in later life. Genome Biol 2015, 16:25.
[0379] 26. Christiansen L, Lenart A. Tan Q, Vaupel J W. Aviv A, McGue M, Christensen K: DNA methylation age is associated with mortality in a longitudinal Danish twin study. Aging Cell 2015.
[0380] 27. Perna L, Zhang Y, Mons U, Holleczek B, Saum K U, Brenner H: Epigenetic age acceleration predicts cancer, cardiovascular, and all-cause mortality in a German case cohort. Clinical Epigenetics 2016, 8:1-7.

[0381] All publications mentioned herein are incorporated herein by reference to disclose and describe the methods and/or materials in connection with which the publications are cited (e.g. review one or more of:
[0382] www.biorxiv.org/conLent/10.1101/2021.03.30.437604v1.full;
[0383] www.biorxiv.org/content/10.1101/2020.09.06.284877v1.full;
[0384] www.bioriv.org/content10.1101/2020.05.07.082917v1;
[0385] www.biorxiv.org/coitent/10.1101/2021.03.11.435032v1;
[0386] www.biorxiv.org/content/10.1101/2021.01.18.426733v1 full;
[0387] Lu et al., Aging (Albany NY). 2019 Jan. 21; 11(2):303-327. doi: 10.18632/aging 101684; Eric Vilain, Stefan Horvath, Sven Bocklandt and UCLA colleagues: U.S. patent application Ser. No. 14/119,145, tided “METHOD TO ESTIMATE AGE OF INDIVIDUAL BASED ON EPIGENETIC MARKERS IN BIOLOGICAL SAMPLE”; “METHOD TO ESTIMATE THE AGE OF TISSUES AND CELL TYPES BASED ON EPIGENETIC MARKERS”. Inventor: Stefan Horvath. UCLA Case #2012-364 U.S. Patent Publication 20150259742, U.S. patent application Ser. No. 15/025,185; Hannum et al. “Genome-Wide Methylation Profiles Reveal Quantitative Views Of Human Aging Rates.” Molecular Cell. 2013; 49(2):359-367 and patent application publication US20150259742). Publications cited herein are cited for their disclosure prior to the filing date of the present application. Nothing here is to be construed as an admission that the inventors are not entitled to antedate the publications by virtue of an earlier priority date or prior date of invention. Further, the actual publication dates may be different from those shown and require independent verification.

TABLE 1
POLYNUCLEOTIDES HAVING CpG METHYLATION SITES

| CpG No. | CpG ID | CpG Source Sequence | Clock Species | | | | | |
|---|---|---|---|---|---|---|---|---|
| 1 | cg12841266 | CGCCTTCAAGGCGGCCGCCTTCTTCGTGCTGCTCTCCATGGTGCTGATCC | Dog | Cat | Mouse | Rat | Human | Universal |
| 2 | cg27201382 | CGCTGAAGTTGGCTTCCTAGCGGTGTAGGCTGGAATAGACTCTTGGCAAG | Dog | Cat | Mouse | Rat | Human | Universal |
| 3 | cg01712842 | CGGATAAATACACTTAAACGAGGATTTAGTTTTACTCCTGTTGAGTTCTA | Dog | Cat | Mouse | Rat | Human | Universal |
| 4 | cg23985931 | CGCCCTTTGGTGATATAAAATGCAATATTTTCAGGCAGCTATTGAGCTTT | Dog | Cat | Mouse | Rat | Human | Universal |
| 5 | cg09474015 | AGGTTTAATGCCATAAGGCCGGCTGGAGGGCAAGCCCGCGAAGGAGAGCG | Dog | Cat | Mouse | Rat | Human | Universal |
| 6 | cg05322294 | CGCCCCTTGGAGTTCTCCAGTTCTGTGAATGGTGTGCACCGTTTTCCGCC | Dog | Cat | Mouse | Rat | Human | Universal |
| 7 | cg12373771 | AGCACCAGTACAGGTCGGTGACGGCGATGAGGTACAGGTCCAGCAGGCCG | Dog | Cat | Mouse | Rat | Human | Universal |
| 8 | cg14738500 | GCTGAAAATACCTTGACACCCAATCCGAGAGGTTTGCTCATTTCCCTTCG | Dog | Cat | Mouse | Rat | Human | Universal |
| 9 | cg09227056 | AGTCAGCTAAATGAAACATTATTCTAAACATATGCATCGTAATCAGTTCG | Dog | Cat | Mouse | Rat | Human | Universal |
| 10 | cg14056866 | CGCGGCAGGACTCGAACCTGCAATCTTCTGATCCGAAGTCAGACGCCTTA | Dog | Cat | Mouse | Rat | Human | Universal |
| 11 | cg15253243 | GAGTGACGTCAGGAGCAGAGGCCGGAGCTGTCCATCAGCACCAAAGGCCG | Dog | Cat | Mouse | Rat | Human | Universal |
| 12 | cg18223258 | CGCGACCTCACAAGTCAAGCGCCTTGTTTGGATTAGCCCTCCAGATCTGC | Dog | Cat | Mouse | Rat | Human | Universal |
| 13 | cg19711579 | GCGACAGATGGGCCACTTTCTTCTGGCCACAAAGGGGCCGGAATGGAGCG | Dog | Cat | Mouse | Rat | Human | Universal |
| 14 | cg22358580 | CGGCCACTCATAAATTTGGCTTGATGACCTCCGGGAGGTTAGTGATGGAA | Dog | Cat | Mouse | Rat | Human | |
| 15 | cg07032889 | TGCACGGGCTACGTCAGAATTTACGGATCCTGACTCCAGGAAGGCATGCG | Dog | Cat | Mouse | Rat | Human | |
| 16 | cg11015311 | TGCATCATTCCTGTTCTGTTACGGGAAACAGGCAATGTCTGAGACTTTCG | Dog | Cat | Mouse | Rat | Human | |
| 17 | cg13366440 | CGGGCAGCTACTTCCCCTACAAGCACAGCTACATGTGGAGCCTCAGGTGG | Dog | Cat | Mouse | Rat | Human | |
| 18 | cg15578619 | CGCCCTGGGGAAAAGTGACTCCTCATACATATTACTTTAGCCTAATGGCC | Dog | Cat | Mouse | Rat | Human | |
| 19 | cg24712893 | GAATTGTGTGAATTATCCCAGCTCAATTCTTTAAGTTAGTCAGAGGTACG | Dog | Cat | Mouse | Rat | Human | |
| 20 | cg18753125 | TATTTATGCAAAAGTGAGCCGACTTTGTTCGCCAGGTAACCGGGCACGCG | Dog | Cat | Mouse | Rat | Human | |
| 21 | cg19365356 | CGGAGGCACAGTCAGTATGGTGCTGTGTGCTTGTTGTTTTGTTTTGGTTT | Dog | Cat | Mouse | Rat | Human | |
| 22 | cg20913114 | ACACTGCTCCTGAGAACTGTCGGAAACAATGTCTGTGGTCGGAGGTGACG | Dog | Cat | Mouse | Rat | Human | |
| 23 | cg22736354 | CTCGAGTGCAAGGTGTGCTTTGAGAAGTTTGGCCACCGGCAGCAGCGGCG | Dog | Cat | Mouse | Rat | Human | |
| 24 | cg23223379 | CGCACAATTTTATTGATTGAAGAGATTAGGACAAAAACATTAAACCAAAT | Dog | Cat | Mouse | Rat | Human | |
| 25 | cg25361778 | CATCACAAGAAATGTATGCACTGGAAACTTACAAGCTTGCTCAAGATGCG | Dog | Cat | Mouse | Rat | Human | |
| 25 | cg27386817 | AAAATGAAAAATTTTGTGTTGTTGCGTTCCCTCTCACTCACTCCCCCTCG | Dog | Cat | Mouse | Rat | Human | |
| 27 | cg11084334 | CGCCATCATCAACGTGGTGGTCTTCATCCAGCCCTACTGGGTGGGCGACA | Dog | Cat | Mouse | | Human | Universal |
| 28 | cg19719141 | GGCCACGCTTTATTAAATTCTCATAAACCTGTCAGGGGGGACAGGGCTCG | Dog | Cat | Mouse | | Human | Universal |
| 29 | cg12879445 | AACTGGACAGCACCATGTCCACCAAAGCGGAGCAGTGTAAGTAGCAGCCG | Dog | Cat | Mouse | | Human | Universal |
| 30 | cg02034779 | CGCAAGAGGCATTTTTGCAAATACCATGCAAAACAGGCAGCTGGTGTGCC | Dog | Cat | Mouse | | Human | Universal |
| 31 | cg24664689 | GCAGCCCCAGTAGCACGAGGAGGTGTTGCAGCAGTGGCAGATGTGCATCG | Dog | Cat | Mouse | | Human | |
| 32 | cg23893313 | TTGGTCATGTTCTGCAGCAGCGACTGCAGCTCCTGCGTGTTGCCCTTGCG | Dog | Cat | Mouse | | Human | |
| 33 | cg22669570 | GAATATCCCCAGTGTTCTCATCAATAATGAAAATGGAACTTGCCCCTTCG | Dog | Cat | Mouse | | Human | |
| 34 | cg05970544 | CGCCTACTTGTCTTAATTGATCCACGCCTTATGGTCTGAGCTTTCAGTTT | Dog | Cat | Mouse | | Human | |
| 35 | cg08122757 | CTTGAGGACAAACGTAACCAAGACGACCAATTGTTATTGCTAAGGTAACG | Dog | Cat | Mouse | | Human | |
| 36 | cg12015981 | TAACTGTATAATTTATAATAATTGATTTCATTTTGACTGACCACCAGTCG | Dog | Cat | Mouse | | Human | |
| 37 | cg12540775 | CGCAAAAACTATTTTAAGACTTTCTGAACTTTGACCAGATGTTGACACTT | Dog | Cat | Mouse | | Human | |
| 38 | cg09461098 | CAGCCAGTCCTCCAGGTTCAATAGGAGATGGCTGGCCACGTGCCAAATCG | Dog | Cat | | Rat | Human | Universal |
| 39 | cg17986111 | CGTGGCTCTATCTGGATCACAATCACATCTGCTCCGTGCAGGGGGACGCC | Dog | Cat | | Rat | Human | Universal |
| 40 | cg15726426 | GAGGAGATCCGCTTCTACCAGCTGGGCGAGGAGGCCATGGAGAAGTTCCG | Dog | Cat | | Rat | Human | Universal |
| 41 | cg07900685 | CGTCTGTGGCATGGTTTGCATTGGGCCCAATGTGCTTATGGTACATAAAA | Dog | Cat | | Rat | Human | Universal |
| 42 | cg10233638 | CAATCTGCTCTGAATATATATTACAGCTTTAACATCACAGAGGGAAATCG | Dog | Cat | | Rat | Human | Universal |
| 43 | cg14322760 | ATAACATTGGATTTGCCACTGCCATTTGGCCCGATAATACAGGAAAAGCG | Dog | Cat | | Rat | Human | Universal |
| 44 | cg20049544 | CGCAGAATTTATACCATCATGTCAGCAGAGGAGGTAGCCAATGGGAAAAA | Dog | Cat | | Rat | Human | Universal |
| 45 | cg24488281 | TTCGCCCCTTGGAGTTCTCCAGTTCTGTGAATGGTGTGCACCGTTTTCCG | Dog | Cat | | Rat | Human | Universal |
| 46 | cg27300575 | GAGCCTACCTGACATTTTGGAGAATTTGCTGTGCTGGGATTGATATTCCG | Dog | Cat | | Rat | Human | Universal |
| 47 | cg17458251 | TCCTTCTTCCCCGTAAAACTTTGTCCAAGTACCTCATGTACGGTAATCCG | Dog | Cat | | Rat | Human | Universal |
| 48 | cg13848598 | GCAGGTACACGAAGGCCATGATGCACAGGGGCACGTAGAAGGAGACTACG | Dog | Cat | | Rat | Human | |
| 49 | cg18473521.1 | TTACCCATTCTCGCTCGTAAATCCAGTTCAATTGTGCTAACCCAGAGTCG | Dog | Cat | | Rat | Human | |
| 50 | cg14401402 | CGGTGTGTTTTGATTATTTTTTACATGTGCCTACTGACTTCCGACATGAG | Dog | Cat | | Rat | Human | |
| 51 | cg24644551 | AACGGCTCAATAAAAGTATTCAGAATCCCTCTCAAGTTGCCTTTTAACCG | Dog | Cat | | Rat | Human | |
| 52 | cg01360767 | AATTTGTTTGCTGCCTTTTCAATTTGCCATTCAGTTTCCATGGTTTCACG | Dog | Cat | | Rat | Human | |
| 53 | cg03120509 | AATTTTCTCTTCACCTCATATTATTAAAAGTAATAAGTTTTTCTGGACCG | Dog | Cat | | Rat | Human | |
| 54 | cg04295410 | CGGGCAATTTAATTACTGTTGGTAAAATAAGAAATGAATGATTGCATATC | Dog | Cat | | Rat | Human | |
| 55 | cg04426657 | CGGATTCTCCATTTGCTTTTATATTGGAAAAATATGTGCTGTGCCAATGA | Dog | Cat | | Rat | Human | |
| 56 | cg04512256 | CGGCAGAAAATTGGCAAGGCTTAATAAACCTCATGCCTGACGCACTCCTG | Dog | Cat | | Rat | Human | |
| 57 | cg04573984 | CGCTCCATTTTATGGAAACAAGCTCTGCGGAGAGGGCTTTGATGCTCTAA | Dog | Cat | | Rat | Human | |
| 58 | cg05081470 | CGCCCAGCGAGGACATCTGGAAGAAATTCGAGCTGGTGCCATCGCCCCCC | Dog | Cat | | Rat | Human | |
| 59 | cg07803121 | CGGTCCCCAGCCCCCTGCTCAGCTCAGCCTCGGCCAGGAACGCCATGTTA | Dog | Cat | | Rat | Human | |
| 60 | cg08215831 | CGCTCTCTTGACAGCTCGATTGCGTGCTGCCTCTGCTCCTGCATAAATCA | Dog | Cat | | Rat | Human | |
| 61 | cg08707435 | GGTGGTAGTCGTCGTATCTGGGGTGGTAAAGAAGCCCAAGGTCACACGCG | Dog | Cat | | Rat | Human | |
| 62 | cg09410314 | TGCTGGCTCTGAAGCCGTGTAGAATTTCGTAATGGAATGTGAACTGCTCG | Dog | Cat | | Rat | Human | |
| 63 | cg10172301 | CGGCACCATGACCCTGGGCAGCTGCTGCTGCGAGATCATGTCCTCCGAGA | Dog | Cat | | Rat | Human | |
| 64 | cg10323846 | CTGTGACCGCTGGCTGGATGGGGTAGGCCTGCTGCACAAAAGGCTTGACG | Dog | Cat | | Rat | Human | |
| 65 | cg13222741 | CGGCTCCCCGTGACCTTATTCAATCTTGGGGCTGATCGGGAAATATATTG | Dog | Cat | | Rat | Human | |
| 66 | cg13669200 | CAGGCAGCTGACCCTGAATGAGATCTATAACTGGTTCACCAGGATGTTCG | Dog | Cat | | Rat | Human | |
| 67 | cg14403768 | CGCGGATGTGGTTAACCAGTTTGTATTTGGCTTTGAAGGGCTTGCCCTCG | Dog | Cat | | Rat | Human | |
| 68 | cg16643400 | CGGCTTCCGAATGGTAAACTGAAATGTGACGTCTGTGGCATGGTTTGCAT | Dog | Cat | | Rat | Human | |
| 69 | cg17213363 | TCTTTACCAGAATTTTCAGCCAGCCGTAACTTTCCACAACAAAGATACCG | Dog | Cat | | Rat | Human | |
| 70 | cg21249517 | GCTTCTTGCCCAGGGAGCCGCTGCAGTTGTACTGCTTGCGCAGGTTCTCG | Dog | Cat | | Rat | Human | |
| 71 | cg22875689 | CGCACCAACCAAAGACAACATATTGGGAAGAAAAATGCTTGTAAACTGCA | Dog | Cat | | Rat | Human | |
| 72 | cg23930466 | CGCAGGAGCCTTCACGGAGCAGATTCTGAGGGACATGGCCTCCTTCCACG | Dog | Cat | | Rat | Human | |
| 73 | cg25291023 | CGTCGAGAAGTATAGACCTGCCTCCGCCTCAGTATCGGCTCTGATTGGAG | Dog | Cat | | Rat | Human | |
| 74 | cg25945416 | CGCTGAGAGAAGACATAATCAATTCCCCAGCTGGCACTTTGCGCTGAATA | Dog | Cat | | Rat | Human | |
| 75 | cg25767194 | CGCGTTAACTCGGCTGGAACGCTGGTTAATTTAACAGCAGGAGTTGAATT | Dog | Cat | | Rat | Human | |
| 76 | cg26677826 | AAGGTGACAGCCAAGCCGCGTTAGCACCTGCATAAAATATTAAAGGGACG | Dog | Cat | | Rat | Human | |
| 77 | cg25947654 | CGCTCAGTTCAGCTTTAATTATGACTCTGCAGACCTGAAGAAATATTGCA | Dog | Cat | | Rat | Human | |
| 78 | cg04267424 | CCCGGCGCTTAAATCTGTGGCTTAATCCTTTTGCAAATATGCATTGATCG | Dog | Cat | | Rat | Human | |
| 79 | cg09915949 | TTCTAATGTTCCATTGTGAGGAGCTTCCATTGTGACGTCGCGCCCCTTCG | Dog | Cat | | Rat | Human | |
| 80 | cg24470719 | GATCTGTTCATCTCCGCTCTTCCTCGACTCTTCTCTCTTCTTGTCTTACG | Dog | Cat | | Rat | Human | |
| 81 | cg07175149 | CGCCCCCTACCTGGGTGCAACATACTTTGGAAATAGAAGATGACCAGGAT | Dog | Cat | | Rat | Human | |
| 82 | cg26512254 | AAGACCCCAGTGGCGCTGTTTTAAAAAGCCCCCAAGAAGTGAAGAGCGCG | Dog | Cat | | | Human | Universal |
| 83 | cg01153166 | CGATGGCTTTCCTGAATGGCTGACTGTGGGCTGCCCTGGACTTGGCCCCC | Dog | Cat | | | Human | Universal |
| 84 | cg10250869 | GGGCTCAGAAGCCAGTTGTTGGCGCTGTCCGTGGTGCTGAGGAATTCCCG | Dog | Cat | | | Human | |
| 85 | cg27487607 | CGCCGGATGCTAATGATGAAATCAAAATGTCATCCAAGTTAAATGCGGGG | Dog | Cat | | | Human | |
| 85 | cg21908378 | ACTGTACAGCCCATAAAACTCCAAACAGCCTCCAGACACTGCCGCAATCG | Dog | Cat | | | Human | |
| 87 | cg06930747 | CGAGCATATTTTGTAGCTTCTCTTCGCCAGTGGGAAGCCACCAGCAAACC | Dog | Cat | | | Human | |
| 88 | cg03638659 | CGGGCAGTGGGGCCAGTGTCTTTATCGGCCAGATGGTGTGAATTTAGACA | Dog | Cat | | | Human | |
| 89 | cg08327269 | CGCGGAGCGCTCCATTCCGGCCCCTTTGTGGCCAGAAGAAAGTGGCCCAT | Dog | Cat | | | Human | |
| 90 | cg22929401 | AGTCACCAGGGTGGAATATTTTAGCACCTATAGAAAAACCGCCACAGACG | Dog | Cat | | | Human | |
| 91 | cg00563016 | CTCTCCCCGGGCCGTGGAAAGGATCCCACTTCCGGTGGGGTGTCATGGCG | Dog | Cat | | | Human | |
| 92 | cg00674815 | TGGGGGCTGGGGTCCCTGGTCACTATGGGGAGAGTGCAGCAGGACCTGCG | Dog | Cat | | | Human | |
| 93 | cg00703273 | CGGCCTGTGTGAGCAAAGGGAAGGAAATGACACAGGCAGGAAAAAAAAGC | Dog | Cat | | | Human | |
| 94 | cg01127608 | ACTTCCGGGATCGGAAACTGTACTGCAAACAAGACTACCAACAGTAAGCG | Dog | Cat | | | Human | |
| 95 | cg01374277 | CGCAGCAAGTCAGATATGGCTTTTTTATATAATGCTAATCAAGTTTCCAA | Dog | Cat | | | Human | |
| 96 | cg03727787 | CGCTCGCATTTAAGGCATAATTGATTTTTATTGAAAAGCCAGCAGGCACA | Dog | Cat | | | Human | |
| 97 | cg04539724 | CGAGGACCACCTGGCAGTTCATAAACACAAGCATGAGATGACATTGAAAT | Dog | Cat | | | Human | |
| 98 | cg04984522 | CGGCACCAAACAGCTGTAAATTGAAGGTTGTGCTTAGTTTTCTCAACTCT | Dog | Cat | | | Human | |
| 99 | cg05613158 | CGCACCGCACTCCATATCGAGGATGGATTGTTTTATGCTGATGCAATGTG | Dog | Cat | | | Human | |
| 100 | cg05730460 | CGTTGCCGTCTTGAAGATTCAGTAGAACTACATCCCAGGCATGTGTAGGT | Dog | Cat | | | Human | |
| 101 | cg06904135 | CGCTCTCCTCCTGCAGCCGCAGCTCCTCGCCCTGCAGCTGCAGCCGCACC | Dog | Cat | | | Human | |
| 102 | cg07797033 | GCCATGATGATGTTCTCTGTGGCCATGAAAGGCAGCTCTTGCCGAATGCG | Dog | Cat | | | Human | |
| 103 | cg08437267 | CGCACCGCTTCCCCAATTAGGGCTGACAGGCTGGGGGCTACTTGGCTCAT | Dog | Cat | | | Human | |
| 104 | cg08868548 | CGCTGCCCTGTACATTTACAGAAAAGTACCTCTGATATAATAAAGGCTCA | Dog | Cat | | | Human | |
| 105 | cg08885324 | CGCTGTGCTCCTGTGAACATTTCCTGCTATGCCAAGTTTGCAGAGGCCCT | Dog | Cat | | | Human | |
| 106 | cg09610373 | CGCTTTACCATCAAGTTCCAGGAGTTCAGCCCCAACTACATGGGCCTGGA | Dog | Cat | | | Human | |
| 107 | cg09689442 | AAAAGGTTTAATTTCCATTTTCCTGCATCAGCTTTATTTATAAAATGTCG | Dog | Cat | | | Human | |
| 108 | cg10735971 | AGCGAGCCATCCTGAGGTTTAAACAGACAGAAGACACACAAAGGTGATCG | Dog | Cat | | | Human | |
| 109 | cg11155697 | GTAACCATAGAGCATGAATTACCTCTTGAGGTCATCAGCGAGAATTTACG | Dog | Cat | | | Human | |
| 110 | cg11383875 | GCGTGTGTGGGGACTTCTCACTGCCACGGACCCTTGATGCATGCTCCCCG | Dog | Cat | | | Human | |
| 111 | cg11940021 | CGCTGGTAACCGCAGCCAGCCATTATGGGCAGGGGTTTCAAACATATGGC | Dog | Cat | | | Human | |
| 112 | cg12596040 | CGGGGGTTTGGTTACTTTATTTCTAAAGTTGTTTGTATTTCTAAAGTGGC | Dog | Cat | | | Human | |
| 113 | cg12644878 | CGAGCTCAGACAGCGACAGTGATAAGTCCACAGAAGACCCCCCAATGGGT | Dog | Cat | | | Human | |
| 114 | cg12695985 | CGCTCCATCTCGTGCAGGAAGCTGTAGAACTGAGGCAAGGTTAATTCTGG | Dog | Cat | | | Human | |
| 115 | cg12945499 | CGCCTGAAGTAAGCAAATGTCCGTGTAAACCAGCTGTAAATTTCATTAAG | Dog | Cat | | | Human | |
| 116 | cg13380048 | CGCACCGCCACCTACCTACCGGAGGTTGCAAAGGAGCAAGGTCATTGTTG | Dog | Cat | | | Human | |
| 117 | cg13436384 | AGCAATGCCACCTACTCCTGTCCTCGTCAGAAGAACTGTTTGATTGATCG | Dog | Cat | | | Human | |
| 118 | cg13621099 | CGCCTTGTCATTCCTGAGGTTCTCATGGGCACTGGAAGAGGAAAAGCTCA | Dog | Cat | | | Human | |
| 119 | cg13647620 | CGAGGATAATTAAGTGGTGAATAAGGGTCAATGTGGACAAATAAATCAAA | Dog | Cat | | | Human | |
| 120 | cg14104528 | CGCTGATATTGAGTCATATAGGCCATGTAGCTAGCAGCTCGGGCTGCAAT | Dog | Cat | | | Human | |
| 121 | cg14219291 | GGCGGCGTCCATTTCGGGCTACACCTTCAGTGCTGTGTGTTTCCACAGCG | Dog | Cat | | | Human | |
| 122 | cg24089067 | GAGGAGTCACTTTTCCCCAGGGCGCAGTAACTATTTTTGCTCCCCAGTCG | Dog | Cat | | | Human | |
| 123 | cg15112775 | CGGGCCCCAAGCCCTGCCCTCAGTCAGTGAAAGCAAGTGCCTCTCATGTG | Dog | Cat | | | Human | |
| 124 | cg15582951 | CGGCTGCCTGCAACCAGGATGTTCTTATGAGCTTTGAAGATTTTTCCGCT | Dog | Cat | | | Human | |
| 125 | cg15632198 | TAATTCAGACATTCAAATGCAAAACCGCACCATTTGGAGAGTGTAATGCG | Dog | Cat | | | Human | |
| 126 | cg25922845 | TATTTCTCATCTTACTTTTTCCTTCACGTCCAGGTCACTTTAAGACTTCG | Dog | Cat | | | Human | |
| 127 | cg18634499 | GTGCTCAGCAAATACACCAACCTCCTCCAGGGCTGGCAGAACAGGTAACG | Dog | Cat | | | Human | |
| 128 | cg19382919 | ATGTATATACACAAATAATTGGATTTTCCTGATCAAAGGGGGCCTTGCCG | Dog | Cat | | | Human | |
| 129 | cg19520890 | CGGAATTGGAGAATATACTGGTCGCACCATTTTAATAGCACTTGTGCCCT | Dog | Cat | | | Human | |
| 130 | cg19721103 | CCGCCCCCTAAAGACAACATTCCCGCCCTAGTGGAGGAGTACCTGGAACG | Dog | Cat | | | Human | |
| 131 | cg19848879 | CACAGATGTTGTTTGGCTGAAGAGCAGCTGAATCCCCTCTCTGGCAGCCG | Dog | Cat | | | Human | |
| 132 | cg20830232 | TTAAATTCAGATTATGCTGAAGCAAAATGGTCCTGGTATGAGAAGCAACG | Dog | Cat | | | Human | |
| 133 | cg21081239 | GGCTTTGTTTTTGTGTTCTACCAGCAGAGGATTACATTACTGATTGATCG | Dog | Cat | | | Human | |
| 134 | cg21380560 | CGCGTCTCACGCGCTTGGGAGAGAGTTTGCAAAGTCATAATTATATCTCT | Dog | Cat | | | Human | |
| 135 | cg21821706 | GTCAACCGGGCAGAGTCTTTCAGACAGCTGTGGGACGGTGCTCGGAAGCG | Dog | Cat | | | Human | |
| 136 | cg22515205 | CGTGACAAACAGGTTGGGGTTTTGATCATTAATCCTGCTAAAGCAATATT | Dog | Cat | | | Human | |
| 137 | cg22952564 | CTATTCAACAGTCTATCTCTGTCATGGTTCATTTATGTGTGAGCATGACG | Dog | Cat | | | Human | |
| 138 | cg25872155 | GGCTTTTCTTATTCAAAACAGGCCCACAATGGGCTTCACAGTGCGCCTCG | Dog | Cat | | | Human | |
| 139 | cg23810523 | GAATCAGTACAAAATAGGTGCTACCTAAACGTTCCTTCTACCTGAATTCG | Dog | Cat | | | Human | |
| 140 | cg24315421 | GTCCCTGGTTACCGGGGCAACAGAAGCAGTGATGAAAATCATGCCTTTCG | Dog | Cat | | | Human | |
| 141 | cg24570504 | CGCAGCAGCAGCCGCAGGAGCTGGCCCGGGACAGCAAAGGCCGCTTCTTT | Dog | Cat | | | Human | |
| 142 | cg25162386 | CGCGCGCCAGCTTGTCCACCTCGCGCTCCAGCTCCGACTTCTGCTTCTGC | Dog | Cat | | | Human | |
| 143 | cg26158731 | AGTGAGAAATTCAGAAGACTGAAGCCCAGGCTTACTGTCTACCTTTCACG | Dog | Cat | | | Human | |
| 144 | cg26699785 | GTGGGACCTCTTCATGTCCCCTCAGTTAATTTCAGAATTAATTTGCAACG | Dog | Cat | | | Human | |
| 145 | cg26921187 | TGCCTGGTCATGTGTCGCCTTTTTTTGTTTGCAGTGGAAACAATTTCTCG | Dog | Cat | | | Human | |
| 146 | cg26903477 | GGCTCCAGGAAGCTGCTGCTGACAATGAATGAAGGGATACGGTTTACGCG | Dog | Cat | | | Human | |
| 147 | cg27096534 | TAATCATTGAACTTGATTGCACATTCTCTTTCCCAGTCATAGTCAAATCG | Dog | Cat | | | Human | |
| 148 | cg17136263 | AGCACGAGGAGGTGTTGCAGCAGTGGCAGATGTGCATCGAGCTGCTCTCG | Dog | Cat | | | Human | |
| 149 | cg00787665 | CGGGAGATGAAAGATAGGCCAGTTTTTGAAAATGGCCTGCGTGGCACATG | Dog | Cat | | | Human | |
| 150 | cg01403803 | TTCAAGCAATTTTAATTATATATTTGTGCTACATCAGGGACTCTGGAACG | Dog | Cat | | | Human | |
| 151 | cg19766374 | TCTTTGCTATTTCAGGGAACCAATCTTCCGCCTTCAAGGCAAATTGTACG | Dog | Cat | | | Human | |
| 152 | cg22006949 | GGGGGGAGCCTGGAAACCGCCCCGTGTCCCATTTCCTCCTCTTGTTTTCG | Dog | Cat | | | Human | |
| 153 | cg01614688 | TCTGGTGCCGTGTGTGGTTTCAGGATAAGCTGCCGATGCCACCCAGAGCG | Dog | Cat | | | Human | |
| 154 | cg18442545 | CGGCTAAGCTTGCTCAAATGTATGAAGTGTCAAAAAGTTTCTTTGACATT | Dog | Cat | | | Human | |
| 155 | cg10452170 | TGATGTGCGAGGTGATGCCCACCATCAGCGAGGATGGCCGGCGGGGCTCG | Dog | Cat | | | Human | |
| 156 | cg11102842 | GAACTCGAAGTTGCTCAGTCAATACCAAGCTATTAATCTCTGTCACCTCG | Dog | Cat | | | | |
| 157 | cg05861987 | TCAGTCCCAGACTCGGCAATTTTCTAACAAGGATTAAAGTTGTTTCTCCG | Dog | | Mouse | Rat | Human | Universal |
| 158 | cg23087015 | CGGCCTCCACAAAGGTGCGCGGGGTCAGCCCAGCCCAGCCCAGCCCCAAT | Dog | | Mouse | Rat | Human | Universal |
| 159 | cg01566077 | CGCTACCTGGACGTCAGTATCTTGGGCAAGTTTGCAGTTGTGATGGCTGA | Dog | | Mouse | Rat | Human | Universal |
| 160 | cg08007722 | CGCGGCACTGGAGCAGGTACCATGTGATCCCAGGGAGCGCCTCGTGCCCC | Dog | | Mouse | Rat | Human | Universal |
| 161 | cg23108693 | CGGGAGACAGGTGTTAAACTACTTAATCACTTTAAAATTGTTTTAATTTT | Dog | | Mouse | Rat | Human | Universal |
| 162 | cg09710440 | CATCGGCGTGCTGTGGGCCATCTTCACCATCTGCTTTGCCATCGTCAACG | Dog | | Mouse | Rat | Human | Universal |
| 163 | cg22100382 | TTAAGCACATTTACATTTGGTTCTTAAAATCCAAAATAGCCCATTTCACG | Dog | | Mouse | Rat | Human | Universal |
| 164 | cg23752476 | AATAAGGAATGACTGCCGTGACTACCCCCATCTAGCTATGCCATTCACCG | Dog | | Mouse | Rat | Human | Universal |
| 165 | cg13656236 | CCAAACAGTTAGGACACATTGAAAGAGAGCGTCAATCATGTATTATTTCG | Dog | | Mouse | Rat | Human | |
| 166 | cg27456337 | GACACCAGTTGAAAACCCCTTGAATATTATGTTGAACATTGTCAAAAACG | Dog | | Mouse | Rat | Human | |
| 167 | cg00910419 | CCCATGTTTTGTGTGTCTCTGTCCATCCAGACTCCTGACGTTCAAGTTCG | Dog | | Mouse | Rat | Human | |
| 168 | cg24260138 | CACGCACTGCATTTGCTTCTGGTGCATCTGCTGCAGCTGCTGGAGCTGCG | Dog | | Mouse | Rat | Human | |
| 169 | cg23169811 | CGCAAAGGTTAAGATGAAGTTTCGCTTCTTAGGAAAATTAATGGCCAAGG | Dog | | Mouse | Rat | Human | |
| 170 | cg02604675 | TCAGAGCCCTCTAAGCGCGATTGTTTCTCCCTTTCTAATGACATTTACCG | Dog | | Mouse | Rat | Human | |
| 171 | cg05759182 | ACAGGGACAGCACCTCATCCCCTGGATGGGGGACCACAAGATCCTCATCG | Dog | | Mouse | Rat | Human | |
| 172 | cg02238028 | CGGACAATGTGCTGAGAGCAGAAATTGGATGGTTTGACTGTTCACCGTAT | Dog | | Mouse | Rat | Human | |
| 173 | cg15129763 | CGCTCGCCCTTCTGATAGGTTTTAGAAAGGTCATAATTTAGGGTATTTTG | Dog | | Mouse | Rat | Human | |
| 174 | cg09445259 | CGCTGGTATTCATCTAATGGCTTGTCAAGACAAAACTGTCCCTGTTCTTG | Dog | | Mouse | Rat | Human | |
| 175 | cg15249459 | CACTGACAGAAACATATTTCCCCAATGAGTGACCTTCCACAGCTGTAGCG | Dog | | Mouse | Rat | Human | |
| 176 | cg27005345 | TCAGGTGGTAGTTCATGGCGTCCAGCAGCAGCTTCTGGCAGACCGGGTCG | Dog | | Mouse | Rat | Human | |
| 177 | cg08040307 | ACACGAGTAGATCGGGAAGCAGCCATACTATGGCAAGTCCCTACAATACG | Dog | | Mouse | | Human | Universal |
| 178 | cg18060631 | ACTTCTGAAGGTTATTAAACACCCGGAGGTCGTTAAATGCGCTGTTAACG | Dog | | Mouse | | Human | Universal |
| 179 | cg10501210 | CGGGACTGCGGCACCTTACGGCGGGACCAAGATTTGGGTCTGCGCAGGCG | Dog | | Mouse | | Human | Universal |
| 180 | cg04204168 | CTCTGCCGAGGCTGTTGTTCTCAATCCAGCTCAGAAACTGGCTCAAACCG | Dog | | Mouse | | Human | Universal |
| 181 | cg06250511 | TGCTACATTTTTTCTAGGAACTCTGAACACATTTCATTCTTGTGAATTCG | Dog | | Mouse | | Human | Universal |
| 182 | cg05033071 | CGACTGGATGGTCCGTTACGTGCCCTACTTCAAGGATAAAGGCGACAGCA | Dog | | Mouse | | Human | Universal |
| 183 | cg08026135 | CGGGCTAGATCTTCTTGCTGCTGCTCATAATGGTGCCGCAGCAATTTCTC | Dog | | Mouse | | Human | |
| 184 | cg07517669 | TCTTGAGTTTCATTCGGCGGTTTTGAAACCAAATCTTGACCTGCCTGTCG | Dog | | Mouse | | Human | |
| 185 | cg27556193 | CGCGTTCACATACCCGGGGAGGGCAGTAGAAAGGTGATCAATCTTCATCA | Dog | | Mouse | | Human | |
| 186 | cg17341782 | GTGAACATTTATTGCATATATATTAAAAATTATCCCGGAATCGAGTGGCG | Dog | | Mouse | | Human | |
| 187 | cg13061698 | TTGGTCTGGCGCCGCTTGGAATCTGGCTGGTTGTACCCATCAGCTTTGCG | Dog | | Mouse | | Human | |
| 188 | cg20315976 | CACTGAAAGGTAAGCTCATTTTGAAGACTGGGCTTCTAGAAGCAGAGTCG | Dog | | Mouse | | Human | |
| 189 | cg05543238 | AATATAGACTCTGCCAGGATGGGAAGGTGCTTTTCAGGCCTACGTCACCG | Dog | | Mouse | | Human | |
| 190 | cg06778009 | TGGTACAGGAACACCAAGTCTATAAGGCCATTGTGTAGCACCAGGGGCCG | Dog | | Mouse | | Human | |
| 191 | cg20382695 | TGGGGGACCAGTGCCAGCACTGCCAGGGCAGGTTCAAGTAAGTGCCTTCG | Dog | | Mouse | | Human | |
| 192 | cg27205362 | CGCCTCCCCCGCAGGTCCTGCTGCACTCTCCCCATAGTGACCAGGGACCC | Dog | | Mouse | | Human | |
| 193 | cg22479660 | CGGCTAATGCATTTTCCAATGTGTGAGGCAGATTATTAATGCGCTCCAGT | Dog | | Mouse | | Human | |
| 194 | cg15396498 | ATCAAATGGCCAATCCTGTTAGCGGCTTAAAAGAGACATAATTACCTGCG | Dog | | Mouse | | Human | |
| 195 | cg25184738 | CTCGGAGACAAACCTCCTGGTGTAAAATCAACCGTCATAAAACATATTCG | Dog | | Mouse | | Human | |
| 196 | cg11060413 | CGGTCCATTTCTGGGCGCTGCAAGATCAGCAGAAACCTGAGAAAGCGCCT | Dog | Mouse | Human | | | |
| 197 | cg21387328 | CGCTGGGTGGTTCAGACTCACATGTCACACACATGTCGTCAGCAACAAGA | Dog | Mouse | Human | | | |
| 198 | cg25876596 | TGCAAACAACCGGGAATGCGATGCATTTGTGTAGCGTGTGCAAATGGGCG | Dog | Mouse | Human | | | |
| 199 | cg27168029 | CGGGAACATGATATTGCAATTAAATTCTTCCAGAGAGCTATCCAAGTTGA | Dog | Mouse | Human | | | |
| 200 | cg14687245 | CTACCTTGCCATTGTCTAGGATATACTTGTCCATGACAGGCGCAGGAGCG | Dog | Mouse | Human | | | |
| 201 | cg13030822 | GGCTGCAGGAGCGGCAACAGCAGCGGCGGCTGCTGAGGGGACAGGAATC | Dog | Mouse | Human | | | |
| 202 | cg26736877 | ATTTGCTTTCGCTTCTGAAAGAGCCGCTATTCTTTGATGATTGGGTAGCG | Dog | Mouse | Human | | | |
| 203 | cg21949697 | GAAGGGGTCCGGCCCAGTCGAGCCTGACGCTCTCACCACAGGAGCTGGCG | Dog | Mouse | Human | | | |
| 204 | cg06147822 | ATCGAGAAGCAGCTGCAGAAGGACAAGCAGGTCTACCGGGCCACGCACCG | Dog | Mouse | Human | | | |
| 205 | cg19368807 | CGCCGAGGCCCCCTCTAGGCAGCAGCCTCAGCCCCTGGTGGAGATCCAGT | Dog | Mouse | | | | Universal |
| 206 | cg15301611 | CGGCGTGATTGAAGGGTTTTTAACAATTAACATAATCAGAAAATGAGCTG | Dog | Mouse | | | | Universal |
| 207 | cg27704080 | CGGCGACAAAGGGCAATATTCACAGTTTATCTCAGGGTGATGGATCTGAA | Dog | Mouse | | | | |
| 208 | cg04796803 | CCGCTTCTAACCCCTGTAATAAATGCATTTGGAGTAATCTGGCGATCACG | Dog | Mouse | | | | |
| 209 | cg20615601 | CGTGTACAAAAGTTCTTGGTTAATTAGGGAAATAAACACTCAGTTCTTTA | Dog | | | Rat | Human | Universal |
| 210 | cg25905455 | CGGAATTTGAAATCCCAGCGAGTCGGTGCCATTTATTTTCAGAGGCTGTC | Dog | | | Rat | Human | Universal |
| 211 | cg17604804 | GGGTGGCATTTCCTTCAGTGTTAACAACAGAGGTTAACTGCACACAGACG | Dog | | | Rat | Human | Universal |
| 212 | cg26067250 | AAGAGATGACCATGACCACCATGCCAGAAAGTCTCAACAGCCCCGTGTCG | Dog | | | Rat | Human | Universal |
| 213 | cg26148010 | CGGTTGAATGTGCTGTGGAATTTGTTTGCAAACCTACGAGAGCGAAGCGA | Dog | | | Rat | Human | Universal |
| 214 | cg08965235 | GTCTCAAGGGCCAGTGTCGGGACAGTTGTCAGCAGGGCTCCAACATGACG | Dog | | | Rat | Human | Universal |
| 215 | cg12201500 | CGTCGGAATTTGCCGAGGTATTCTTGCAGTTTGGGGTCAATGTCCAAATT | Dog | | | Rat | Human | Universal |
| 216 | cg22805522 | AATTTTACTAGCTTTCTGCCCCTAACTGCTCTCTCATCGTTAATTAAACG | Dog | | | Rat | Human | Universal |
| 217 | cg14550108 | CATCATGACATGGCAAACGGCTATATAAATGAATTTTTCTAAACCACACG | Dog | | | Rat | Human | |
| 218 | cg18473521.2 | TTACCCATTCTCGCTCGTAAATCCAGTTCAATTGTGCTAACCCAGAGTCG | Dog | | | Rat | Human | |
| 219 | cg06247149 | CGCCGGAGGGAACTCTCAGACCGCTTGAATCTTAGTGACCAGCAGGTCAA | Dog | | | Rat | Human | |
| 220 | cg10508317 | AGCTGAAGGTCTTGAGGCGCAGGCTGGTGTCCAGGGGGGGGCTCATCCCG | Dog | | | Rat | Human | |
| 221 | cg12195149 | CGGCCCAACGTGCAGGACCAGCTCCAGGTAGAGAGGCTGCAGCACACATA | Dog | | | Rat | Human | |
| 222 | cg17230508 | CGCCAGGAATTGCGGGGCGGCACCTTTTAAATATATAATTGATTCTGTTT | Dog | | | Rat | Human | |
| 223 | cg14475241 | ATGAATTTCACCACCAAAAACACAACAACTTCTCCAATCATAAAATACCG | Dog | | | Rat | Human | |
| 224 | cg18588934 | CGAAAAGATCAGTATCTGTCAGTCTGACAGCTGATTGGCTGCTCGGAGAT | Dog | | | Rat | Human | |
| 225 | cg03180785 | CGCCTTTCCAGATGCAAAAGTTCAGCCCCTCTGATGTCATGACGGATGAA | Dog | | | Rat | Human | |
| 226 | cg03214473 | AGACACCTGGATAGCAGACTTGGCTCTGATTGGGCAGCTCAGTAGCAGCG | Dog | | | Rat | Human | |
| 227 | cg05361761 | GGCACACGTTGATGGCCATGTGCTCCTGGATGTTGATGGTCATGCGATCG | Dog | | | Rat | Human | |
| 228 | cg04629621 | CGCGGAATAAAAGATGCTACAGAAATCATCTTTGAGATGTCAAAAGACGA | Dog | | | Rat | Human | |
| 229 | cg06548914 | CGCCCTGATTGGGATCAGATAAAGAGGGAATTTTTACAAATTAGGGAATA | Dog | | | Rat | Human | |
| 230 | cg22972685 | GAAAGCAAAACATTCAATCAGGCGGATTAAGTGCGTAATGCGTCTCATCG | Dog | | | Rat | Human | |
| 231 | cg08711810 | CGCCCCTGAATTCGCATCCGAATATGAGGCATTTTTATGTGAAAATGGAA | Dog | | | Rat | Human | |
| 232 | cg15917885 | CGGCCTCATAAATCAGTTTTTAAGTAGCAACCACATGGACATTTCCCAGC | Dog | | | Rat | Human | |
| 233 | cg12456170 | CGTCAAGCTGAATTAAGCATACAAATCAGATGAGGCATAGCAGATTACAC | Dog | | | Rat | Human | |
| 234 | cg19826361 | GGTCAAGGGGCTTCCGAGGTCATTTTGTGGTTCTAATACTGAGCTAATCG | Dog | | | Rat | Human | |
| 235 | cg00109797 | CGGGGGGAAGAGGCTCAATTTGTAGCCTATTATCCTATACGAAAATGTCC | Dog | | | Rat | Human | |
| 236 | cg07150184 | CATGTACATGCTGCTGAAGCACCTGGTAGACAGGTACAATCTCTACTACG | Dog | | | Rat | Human | |
| 237 | cg01180566 | GCATGATTTCCTTCTGTATCTTGGGGTCCTGAGTATTAATGTTGGCATCG | Dog | | | Rat | Human | |
| 238 | cg01193554 | CGTGTCTTTAAAATGCAACTGCAGGTAGAGAAGACTGTTAACCCTTTGCT | Dog | | | Rat | Human | |
| 239 | cg01351663 | GCTTGTAACTGTTAAAAATGACTTGTTAGGAAGCGTGTGGGCTCTCATCG | Dog | | | Rat | Human | |
| 240 | cg03125191 | TCCTAGCTCTTGCTCAGAGTTGAGGCCTTGGTCGGGTATGTGTGCGTGCG | Dog | | | Rat | Human | |
| 241 | cg03948870 | CGGCACCAACAGATTTACTTGATTTGCAAGTTAACTACAACATTAACTGG | Dog | | | Rat | Human | |
| 242 | cg06857779 | CGTGCTAACTCCAGACTATATTCTCAGACGGGGATGGAGTATTTTCGAAC | Dog | | | Rat | Human | |
| 243 | cg06960698 | CGTGGCTACGTCATGGAAAGCCAGTCTTTTCAATGCAAACTTCAACTCCT | Dog | | | Rat | Human | |
| 244 | cg18528188 | GACACGGACCCTGAGCTGGTGTTCCTTTGCCGCCATGTCTATGACTTCCG | Dog | | | Rat | Human | |
| 245 | cg07421911 | CGTGAGAAGGAGCTTTGTGTTTTGGAGTCTGGACTGGAACCAAAGCAGAC | Dog | | | Rat | Human | |
| 246 | cg09237433 | GCTTCCACTGTGAACGCCTCCCGGGGAATCTCAGCCAGCACTTCTGGACG | Dog | | | Rat | Human | |
| 247 | cg10221825 | TGGGGGATTATAAATGTTCACGCAATCAAGTTCATTAGGACTTCAAATCG | Dog | | | Rat | Human | |
| 248 | cg10529428 | TATAGAGTGTATAAAACAAGTTTCCCCTTCTTATTTTCTGCTTTAAAACG | Dog | | | Rat | Human | |
| 249 | cg10820947 | CGGAGCAAATCTGGCCCAGAAGGCTGCACATATTTTTGCCTGGATAGACT | Dog | | | Rat | Human | |
| 250 | cg22235058 | CGGACCGCTGCCAAAGTCAGAGGGAAAATGAAGTCTTTGTTAAATGCCTT | Dog | | | Rat | Human | |
| 251 | cg11629501 | TTTTGGTCACTCCACAGGGCTAAAATAGCCGAGTTGGCTTTAATGTGTCG | Dog | | | Rat | Human | |
| 252 | cg12597232 | CGCCCAGGCCTGCCTCGATGGCCATCACTACTTCCAAAGACAGGTTGTAG | Dog | | | Rat | Human | |
| 253 | cg12719939 | CGGCCAATAAAAGGTTTATGACATCTGACCGGCAGTGAAGGTATGCGAGC | Dog | | | Rat | Human | |
| 254 | cg13329717 | CCGAAACGAAAAGACAATTTACCCATCACTGAGTCTCTGCTGTTTCCTCG | Dog | | | Rat | Human | |
| 255 | cg21878650.2 | CGGCTTACTTTAGCTACTTACGCTGGACTGTCACAGTGTCTTAGGGATGA | Dog | | | Rat | Human | |
| 256 | cg14838851 | CGTCCTGTGCCCAGATAAACAAGAAAGAGAAAAGGAGTCATCATGTCAAC | Dog | | | Rat | Human | |
| 257 | cg15091323 | CGGGAGAGCCGGGTTAGAAAGAAGGAGACTCCAGAGAAAATATCTTCATC | Dog | | | Rat | Human | |
| 258 | cg17077229 | CGCCGCATGGTCAAAACTCAGGCCTTCTACTGGACTGTACTCAGTTTGGT | Dog | | | Rat | Human | |
| 259 | cg18217426 | CGCAAAAGTCCGGTTGCAGAGCTTACATTGGAATGTGGAGCCCAAGTCTT | Dog | | | Rat | Human | |
| 260 | cg18599609 | TCCGTGTATGGCAGCTTGGTGGACACGTGAAACATGATCTCCTTGTTGCG | Dog | | | Rat | Human | |
| 261 | cg19269615 | CGCTCCCTGGAGAATTTCAGTTCTGTAAATGAAACAATTATTTTGGCAGT | Dog | | | Rat | Human | |
| 262 | cg26848592 | CGCTGGGTCAATATAGCTGCTTGTCAATTCAGAAATGCAAAGTGCTGTGT | Dog | | | Rat | Human | |
| 263 | cg27274433 | AAAAGTTAACACTACAGCAACGCTATATTTACCAGGGCCTGCCCATATCG | Dog | | | Rat | Human | |
| 264 | cg09387107 | CGGCGCTTCCGAGCACCGTCCCACAGCTGTCTGAAAGACTCTGCCCGGTT | Dog | | | Rat | Human | |
| 265 | cg24396988 | GAATGTAATTAGGTTGTCATCCTGGGGCCTCCGAGCCAGGCTTCCGAACG | Dog | | | Rat | Human | |
| 266 | cg18475091 | CGCCACCGGGAAAACCCAAGAGTACAATAATAGCCCCGAAGGCAGCTCCA | Dog | | | Rat | Human | |
| 267 | cg25485747 | CGTCAGCCGTCTTTCACCAACCTCAAAGGAAAGTTGAATGCGGGGCTCAC | Dog | | | Rat | Human | |
| 268 | cg25534230 | TGACCAAATCGAGCAGTTCAACGACCACATGAGGATGCATGTGTCTGACG | Dog | | | Rat | Human | |
| 269 | cg25841491 | CGCCATTCATCAGTTTATGCATTGTGCGCCAGGGCAAATAATGACAGAAT | Dog | | | Rat | Human | |
| 270 | cg21732208 | CGCACAAAGAGGATCCCATGGCAACAAACAGCGAGGCCCACAGTTGGCTC | Dog | | | Rat | Human | |
| 271 | cg13566279 | CGCCCTAACAAAGAGGCAGAAACTGTGTCTCAACAGCCACCAAATCCAGT | Dog | | | Rat | Human | |
| 272 | cg05078979 | CGGAACTCCCAGGAAACCTGGATGAAGTGTAATTATCTCAGCTCAATCAG | Dog | | | Rat | Human | |
| 273 | cg17314597 | CGACCTTAAAGAGTCTGCGAGGCTGAATGAATTGGTGCATCTCGCTGCAT | Dog | | | Rat | Human | |
| 274 | cg18288197 | GAGGAAATAATAGCCATTTCCAATGATAATACACAATTTTAGCACTGACG | Dog | | | Rat | Human | |
| 275 | cg13500074 | AAAAATGGCAAAAGCCCCCCTGAGCTGCAAGTTCAAGTGCGGACGTGACG | Dog | | | Rat | Human | |
| 276 | cg15545854 | CGAACAGAGGAGAAGCCGAGTAGGGAGCAGGTGGCTATCATGAGAACACA | Dog | | | Rat | Human | |
| 277 | cg01196619 | TTAGCCATTATAGGCTAATAAATCATACTTTCTCTTTGAGTTGTCAATCG | Dog | | | Rat | Human | |
| 278 | cg06022033 | TGGGTAAATGGAGTTGTCTCTTTAAAGTGCCCCGGTCAGTTCACCACACG | Dog | | | Rat | Human | |
| 279 | cg19719034 | CGCTTGTTATAGTCCAATAAGCCGTGCCAGTCAAACAAGAACCCACACTA | Dog | | | Rat | Human | |
| 280 | cg15958715 | CGTGGTGCGCTATGAGACCCCTGAGGGCACTTTCTGGGCCAACAACCACG | Dog | | | Rat | Human | |
| 281 | cg23976215 | CGAGGCATTGCTAGTGACCAGTTTGTAAAATGCAATCTGTTATTTTATTT | Dog | | | Rat | Human | |
| 282 | cg11552482 | CTTTGGAAGTTTATAGCACCCTCTAATACCTCTGGAGCCATGTACCTCCG | Dog | | | Rat | Human | |
| 283 | cg19917435 | CGCTGGATTGAATACTAGATTACTCCAAAGTGGCTGAGGGTCAGGGATCA | Dog | | | Rat | Human | |
| 284 | cg26112578 | TTGCGGCCGTGGTTGTTGGCCCAGAAAGTGCCCTCAGGGGTCTCATAGCG | Dog | | | Rat | Human | |
| 285 | cg07588415 | GCGTTCCCAAAATATGACCAGGGGTGCTTGGATGTGTCGGCAGTATGACG | Dog | | | Rat | Human | |
| 286 | cg19626073 | CGGATGCTCTTGCGCTGCCATTTCTGGGTGCTGTCACTGTCCTTGCTCAC | Dog | | | Rat | Human | |
| 287 | cg22789469 | CGCCAGAAGCCGAGGCACAAACAGACGATGCCCCATCCCCAGAAGTTCCA | Dog | | | Rat | Human | |
| 288 | cg18533392 | CGCACTAGCATGGCGCCAGCCATGTACTTACAATGTAGTTACAGAGTAAT | Dog | | | Rat | Human | |
| 289 | cg24505061 | TTTCTTCCTGTGCCTGAACCTCTCTTTCGCTTTTGTGGAACTACTCTACG | Dog | | | Rat | Human | |
| 290 | cg15674081 | AGTCATTATATCAATTTTTGTTACCCAGATACTTCAGTCCCAGTTAAGCG | Dog | | | Rat | Human | |
| 291 | cg16632407 | CCAAGGAGGCTTCAAGACAAAGGGCCCCTTACACACCAGACAGGTAAACG | Dog | | | Rat | Human | |
| 292 | cg15985481 | TGCTGGAGTAGCACTCCAGGTCCTCGCTGATGCTGCTGATGATGCTGACG | Dog | | | Rat | Human | |
| 293 | cg18357583 | AGCTCCCCAGAGGCCCTTAGACTGAGAACTATGATTGTGTTGGAGAAACG | Dog | | | Rat | Human | |
| 294 | cg02783173 | CGCTGAACCAGGAGACAAACACGATTACCAGCTCCGAGCCTTGAGTCAGA | Dog | | | | Human | Universal |
| 295 | cg18961151 | CGCCACCCAGCGGGCAGGGTGACGTCACCGTCTCCCTGACACTCCACATT | Dog | | | | Human | Universal |
| 296 | cg05916870 | GCTGGGAGCAGCCATCCCATAATAGCTGGCCGCCTGTTTTACTGGTTACG | Dog | | | | Human | Universal |
| 297 | cg05039938 | CGGAATTTCGTTTTCAAATAAACCACAAGCTTGGATGAGCTAATGTTGTT | Dog | | | | Human | Universal |
| 298 | cg07547549 | GCTCAGCTCCATTGGAATGCTCCGGGCGCTGTCCAAGGTGCTGGAATGCG | Dog | | | | Human | Universal |
| 299 | cg18304538 | AATATTTGTGACAGATACAACAAATTCTTGCACAAATTACATTTCATTCG | Dog | | | | Human | Universal |
| 300 | cg04414148 | ATACAAAACCGGGGAGTCCCTGCGCCCCAATTATTATGACTGCGGCTTCG | Dog | | | | Human | Universal |
| 301 | cg16286672 | CGGACCTAACTTTTAGAGGATCAATGTGACAAGGCAGTCCCTGATAGATG | Dog | | | | Human | Universal |
| 302 | cg07332354 | TGGTGAATCAATCTTTCCATTCCTGACATTTTGCTAATTTTAGTTTTACG | Dog | | | | Human | Universal |
| 303 | cg07026794 | CGCTTTACATTTCGAAGAAGGGATGCCAGTTCATAAACAGTTTTCGGTGA | Dog | | | | Human | Universal |
| 304 | cg26072749 | TATTCCCCTAGATACGAATTTGTGACCACAAAATTCCTTACACAAATTCG | Dog | | | | Human | Universal |
| 305 | cg03190580 | TTTGTCTGGTCGCCGCGTAATTCGCGCATCCTTATTCAGATTTGGTGACG | Dog | | | | Human | Universal |
| 306 | cg03513784 | TGAGCTAGGCCTATTTCCCTTTCTGTTACTATGACAACGAAATTTTACCG | Dog | | | | Human | Universal |
| 307 | cg03898602 | GTGTACAAGGGCGAGTGGACGCACGGATTCAAGGGGCGCTACGGGGTGCG | Dog | | | | Human | Universal |
| 308 | cg08587692 | CGAGTGAGGGAATTGCCATGCAGAAATAAATGGTAAAACTGGGAAGTCGG | Dog | | | | Human | Universal |
| 309 | cg10801485 | GGAGAGTTAGTGCTGTCAGTTTCTCTCACCTCAGAAAGCCGCCGCAATCG | Dog | | | | Human | Universal |
| 310 | cg11355954 | CGCTGATAGAATAATAAATGACAGAGTAATTACCATTATAAAGAGGGAAT | Dog | | | | Human | Universal |
| 311 | cg14361875 | CATATAAGGGCTTTTGATACACATGACTTACTTGGATGACAAGGGGCTCG | Dog | | | | Human | Universal |
| 312 | cg15471501 | GTTCAAATTGCCAGCTTCTTAAAAACCGCCCATTGGAATAAATTGCATCG | Dog | | | | Human | Universal |
| 313 | cg15809488 | CGTGCCAAAAAAGGGGCAGAGTTTGATGGAGTTGGGTGGACTTTTCTATG | Dog | | | | Human | Universal |
| 314 | cg16756969 | TTCAGCAAAGTTTATCTGCCCGACATAGCAGGAAGTGCTAATTTCATCCG | Dog | | | | Human | Universal |
| 315 | cg17357006 | AAGCGCAAATAAGCTCCCAATTGTCTCCCCAATATGTAAACCACATCTCG | Dog | | | | Human | Universal |
| 316 | cg17369088 | CCTCAGCCTAACTTCCTTTATTTCCTCACAAGTTTCTCCCTCAAACTTCG | Dog | | | | Human | Universal |
| 317 | cg25906744 | AGGGGCGGAGCTGTGGGAGGCAGCCATGGGTGCCATAATAGGCACCTGCG | Dog | | | | Human | Universal |
| 318 | cg21621248 | CGTGAGCAGCTTACGACACTCAGTGAGCAGTAGGTGCCTGTGCAAGCTCG | Dog | | | | Human | Universal |
| 319 | cg25383995 | GGTCCCTGTCGGTGCCACGGACGCTTAAATAAAATGAATCTGTATTTCCG | Dog | | | | Human | Universal |
| 320 | cg13753818 | ATTCTCCTCATGCTATTGTGGTAAGAGGCGCACTTGAAATCTCTCAAACG | Dog | | | | Human | Universal |
| 321 | cg21673805 | ATGATTACCTGCTGCTGCTGCCGCCGCGGCTGAACTCTCATCTTGACTCG | Dog | | | | Human | Universal |
| 322 | cg04267101 | CGGGTCTTTGCAACCTGGGGTGCCTTGACCAACGAGTCAAGGTTGACCAA | Dog | | | | Human | Universal |
| 323 | cg02909927 | TCTCTCCTTAATAATAAAATTATACCAAGCAGTTTGCGGTGTGGCAGGCG | Dog | | | | Human | Universal |
| 324 | cg07323940 | TCAGTGCCTTGTTGGCTAAAGGCCAGAGTGCCATTAGAACATGCTGTACG | Dog | | | | Human | Universal |
| 325 | cg18691948 | CGACTCTGCTTGAAGGAATGTGACAATAAAGTGGGAAACCAAAGCTTGGC | Dog | | | | Human | Universal |
| 326 | cg21452781 | CGATTCCCCACAAAGGTTTCAGCACCATGACCAATTGGTCAGCTCCTCCG | Dog | | | | Human | |
| 327 | cg11373055 | CGGGTCTGAAACTACCTGTAGCTGCAGCTACCTGCCCGCCCCACCTCGGG | Dog | | | | Human | |
| 328 | cg14540643 | CGCCCTCGAGCGGAGCAAGGCGATTGAGAAAAACCTCAAAGAGGATGGCA | Dog | | | | Human | |
| 329 | cg16448606 | CGTGCTCAGAAGTGTTGAAAGAAAGGCCCATTCTCTGCCCAGGGAATTGC | Dog | | | | Human | |
| 330 | cg17596554 | AGGAAATTTAAAGGCTTGGACCCTGCGAGACAGACAAACCGGTGCCAACG | Dog | | | | Human | |
| 331 | cg11023965 | TCCATGATGACCAGAGTTGGCTGGCCCTGAGATACCACACCCAGGAGACG | Dog | | | | Human | |
| 332 | cg11551236 | TTCCACCTAAAACGTTTAGTTTCAGCTCAGTGATCAGCTACCCCAGCTCG | Dog | | | | Human | |
| 333 | cg19828220 | GGAAATGATAAAAAGTTCATGTTCACGATCGCCCGGCCACATGACCGGCG | Dog | | | | Human | |
| 334 | cg03717442 | CGGGCAGAAAACATAAAAGAGGTGACAATTGTATACTTTCTAGGACAAGC | Dog | | | | Human | |
| 335 | cg00295657 | ACTGACCAATGGCAGAGGCAGGAATTGTCAAATAGCACCCAGGAGGAGCG | Dog | | | | Human | |
| 336 | cg04426458 | CGGCATATTGCCTTTTTCAGTGAGGGCATGGCTGTTTATAGCACTTTCAT | Dog | | | | Human | |
| 337 | cg26052854 | CGAGCTCATGCTGGCAGAATAGATTGGGGTTTTAAAACCCCAATTACTTT | Dog | | | | Human | |
| 338 | cg20692569 | ACGTGTGGCCCAGCAGGTTGGGCATGCGGGTCAGGTTGTAGCCGATGCCG | Dog | | | | Human | |
| 339 | cg00720104 | CGGGGAGGGATCATGGATACTTGTCTGCCGGCTTCTGGTTCCCACGCAAG | Dog | | | | Human | |
| 340 | cg07878252 | TGAAGTTCCTATGAAACTATTAAACCCGGGTGGAGGTCAGGCTGGAGGCG | Dog | | | | Human | |
| 341 | cg01572513 | CGCTTTGAAAGAAGTAGAACAACATCTCTAAACAAATTATGACTGGGCCA | Dog | | | | Human | |
| 342 | cg21826256 | ATCCATTGTGGCACAATGTAATATGTATCACCATGCTACACCTGCGGACG | Dog | | | | Human | |
| 343 | cg15660194 | CGATGCATAGAGTGCAAGATGATATGCCCTTCTTGGTCCAGTGTATTGTT | Dog | | | | Human | |
| 344 | cg02520894 | AGCTGCAGAAGCAGAAGTCGGAGCTGGAGCGCGAGGTGGACAAGCTGGCG | Dog | | | | Human | |
| 345 | cg04561722 | GGGCAGGATGGAGAGCGTCTTCAACCAGGCCATCAGGAACACCATCTACG | Dog | | | | Human | |
| 346 | cg19428989 | AAAGTAACAATCCGCCATTACAAAGGTCGTCCTCCTTGATCCAGTTAACG | Dog | | | | Human | |
| 347 | cg10956761 | AGTCAGCACAGCCATTCTCTTCCTGATGAGGGACTTTGAAGACAGTGACG | Dog | | | | Human | |
| 348 | cg19553651 | CGAATTCACTCAGTAAAATTAGCATAAGTATTTACCAGATTAAGCTGACA | Dog | | | | Human | |
| 349 | cg15359095 | TCAGTTTATTGGCTTGGGATCCTGTTTTTTTCACCTTCATAGGAGCATCG | Dog | | | | Human | |
| 350 | cg27564788 | CGCAGGCAGGCCTGCGTGCGGACAGATTTAATATCGTTTGTAAATATGAT | Dog | | | | Human | |
| 351 | cg13673047 | CGTCACGGAGCTTTCCCGGGGCTCAGATAAATAGGCTGGTGGAGTTCCCT | Dog | | | | Human | |
| 352 | cg26360901 | CGCCTTCATGTCGCTCAGCAACTCCTCCAGCTGGTTCAGAACTGGGGCCC | Dog | | | | Human | |
| 353 | cg21107288 | CGCCAGGACCCAGCTCATATCCTGTGTAACCCAGTGGGAGAGGAGCCACA | Dog | | | | Human | |
| 354 | cg18117260 | CGGGAAGGGCTAATTAGCCACCTTCTGGATCAATAAGATTCAGCAAAAAA | Dog | | | | Human | |
| 355 | cg09821379 | CGAGCTGCTCCACTTTCCAGCCAATGTCAGGAGGGGGGATCTCCGCCGCC | Dog | | | | Human | |
| 356 | cg21821439 | CGCCAACTATTCTGGGAGATACACGAGCCCTCCATGTTTATCAGGTTGAG | Dog | | | | Human | |
| 357 | cg13035951 | CGGCGCGAGTTGCCTCTCCGCTTCACGCTCGATTTCCAGGCATTCTTCCC | Dog | | | | Human | |
| 358 | cg23753196 | CGCGTCTAGGCTGAGATGGTTCGCGTGGATATTGCTACTCATTCTAAGAC | Dog | | | | Human | |
| 359 | cg25235127 | GGCTGGCGAAAGACTTCCTCAGGCTGCGGATGGTCTCAGCTTTCACCTCG | Dog | | | | Human | |
| 360 | cg09173346 | CGCTGTTAACGAGGTATTAATCAACACCCCTCAGGAAAAAATAAAAAGAC | Dog | | | | Human | |
| 361 | cg14484649 | GAAGGTGAACCACCGCAAGTACCTGCAGAAGCAGATCAAGCGCTGCAGCG | Dog | | | | Human | |
| 362 | cg13802429 | TATAATTATCGGAAGCAGTGCCTTCCATAATTATGACAGTTATACTGTCG | Dog | | | | Human | |
| 363 | cg16781658 | AGAAGGACCTTGTAATAAATAATATTCTGCACATCAAATCACTTTCACCG | Dog | | | | Human | |
| 364 | cg18174316 | GCCCTATTCCCTGGAGATTCTGAGATTGACCAGCTCTTCCGGATCTTTCG | Dog | | | | Human | |
| 365 | cg19104072 | GGATCACATCGTTGGGGTCCATGGTGGTCTTCAGCAGGCCCCTGTAGACG | Dog | | | | Human | |
| 366 | cg19965314 | CTCCTAGGAGCTCACAGCTCCAAACATCAATTACCATGATTATCTACCCG | Dog | | | | Human | |
| 367 | cg05866783 | GCTCACTCCGATGGGCTTGCTGACCCCAACAGGCCGGCTGATGGTGACCG | Dog | | | | Human | |
| 368 | cg07386222 | CTAGCTCTTGCTCAGAGTTGAGGCCTTGGTCGGGTATGTGTGCGTGCGCG | Dog | | | | Human | |
| 369 | cg03199779 | AGGAATGCGCTGAAGCTTGTAATCAGCTTTGTGAAGCCATTGAGTGCACG | Dog | | | | Human | |
| 370 | cg08035723 | CGCAGACAATGCCTCAGTGATAAGCATGCAGATTGTGCACCTAGTTCAGA | Dog | | | | Human | |
| 371 | cg11065059 | AAGAGATGAGGCTCACGTTGCACGGATGACATCACTAGCTTTTGGCTGCG | Dog | | | | Human | |
| 372 | cg08464821 | CGAGAAGAAGTGGCGGCACAAGTCGAGCGCCCCCAAACGCTCGATCCCCC | Dog | | | | Human | |
| 373 | cg08530978 | CGCCTCGGACCAATCCCCAGTGATTATGCAAGACAGCGGACCAATCAGCT | Dog | | | | Human | |
| 374 | cg21144428 | TTCTGTCCCAATGTGCCCATCATCCTGGTGGCCAACAAAAAAGACCTGCG | Dog | | | | Human | |
| 375 | cg25273233 | CGGCGGGACCATTAATCCTCAGCATGGGGTATTGTCCTCCAGACAGTTAC | Dog | | | | Human | |
| 376 | cg26440026 | TGTACACAGGCTAAGTGGCCCCACTCCAGGACAAGTGGCCCTCTAAGTCG | Dog | | | | Human | |
| 377 | cg09407361 | CGCTCAGGAAGCCTTCTGTTTAGAAAACTGGTGTGTGCGTTTTTTGATGA | Dog | | | | Human | |
| 378 | cg14283980 | AACAAAACATAAACGATCAATAAGTCGATGGCACTTCACATGATTAACCG | Dog | | | | Human | |
| 379 | cg18645607 | CACGAGTAAATTATTCATGATTTTACGAGCTCTTTAGCTCCATTGAATCG | Dog | | | | Human | |
| 380 | cg13385016 | CGCTTGCGAGCAAGGGAGTGTATATACTAAATGCCACACTGTATGTTTCT | Dog | | | | Human | |
| 381 | cg00179574 | CGGGTTTGCCTACAGGTAGATTAGATTAATTATTACTATGTAATGCAAGT | Dog | | | | Human | |
| 382 | cg00622300 | CGCTTTCACAGTCAATGAAACCACCTGAATAGATGAAAGCCAGACAGCTT | Dog | | | | Human | |
| 383 | cg00843538 | CATTTTCCCAGACAATGGTGACTACAAAGAGGCTTCAAAATAGAACATCG | Dog | | | | Human | |
| 384 | cg01743031 | GTCTTGAGAGACTGGATACATAAACTGGCTCCAGCCAGCTGCGGCTGTCG | Dog | | | | Human | |
| 385 | cg01988539 | CAATAGTGGGGGTGGCTGCGTGGGTCGCCATGGGGACGGGGCTGTTCCCG | Dog | | | | Human | |
| 386 | cg02037503 | CGGCAGCGATCAGCCGGAGACATGCAGGGGAGCCATCTTGCCACTTACCC | Dog | | | | Human | |
| 387 | cg02187860 | CCAAGATTTAAAAGCTCATCGCCGGCCTTGTAATGCAGTAACTGATTGCG | Dog | | | | Human | |
| 388 | cg02292529 | TTAACATGCAGCCTGCAAATCAGTAACTTTGCAGCTCAGACTCGCAGACG | Dog | | | | Human | |
| 389 | cg02803284 | TGGCTAGTGAGATCAGGTAAAACCTGATGCATGCTGCATGCTGCTGTGCG | Dog | | | | Human | |
| 390 | cg02846173 | ACAGTTTGGTCGGATCTTTGAGCTGACTGTCATCAAGGACAAGTACACCG | Dog | | | | Human | |
| 391 | cg09776887 | GCCTGTTTCTATTAAGCAGTTCCATGGCCCTCGGCGTGGGTGGTCTGCCG | Dog | | | | Human | |
| 392 | cg03225524 | CGCGAACCAGAAAGAAAAGTATGAGGCTGACCTAAAGAAGGAGATTAAGA | Dog | | | | Human | |
| 393 | cg03242400 | CGACCCGTTTGCATCCATGCATAGTAAGTAGGCGGCGAGCTCGCTTCTCT | Dog | | | | Human | |
| 394 | cg03327468 | CGCCCTTGGTCTGTTCCATTGGCGCACGTTGCCAAAGATGGTCATTTGCG | Dog | | | | Human | |
| 395 | cg03485005 | GAAAATGCCACCAGATGGGGGGTTAGGATTGCAGCTCCGTTGAAGGCGCG | Dog | | | | Human | |
| 396 | cg03617050 | CGCTACCAACAACAATTAAGGCATCAAAAGTGTTCCATGCATCAGTGAAA | Dog | | | | Human | |
| 397 | cg03717201 | CGTCAGGAGTCTGGATGGACAGAGACACACAAAACATGGGCAGGGCGAGC | Dog | | | | Human | |
| 398 | cg03938432 | CGCGTGCCTGTGCTGGTGTCTTAGAGCAAGAGCCTCCCTGAGCTTTCGGA | Dog | | | | Human | |
| 399 | cg04327947 | CGCTGACATCACCATCCGGGGACTCCGGGCCCTTCCCCAAAGTTAACCCT | Dog | | | | Human | |
| 400 | cg12632056 | CGCCCAAGGGCAATTTTAATTGTCTAACCCGGCCCGATTTCCTAAGAGGC | Dog | | | | Human | |
| 401 | cg04472379 | CGGTCCAACACAGTTGATATACATTTGTTTACCTGTTATAGTTGCAAGTT | Dog | | | | Human | |
| 402 | cg04958799 | CGGGCAAAAAGCAGGAACTTGTCAAGACCTGATCAAAGGCCGAAAGGGGT | Dog | | | | Human | |
| 403 | cg11387509 | CGCATCCGAATATGAGGCATTTTTATGTGAAAATGGAAAACCCGGCCAAG | Dog | | | | Human | |
| 404 | cg05094833 | CTACGAAAGCAGCCTAGCCTCCGCATCAATATTCATAAGGCAGTTTGACG | Dog | | | | Human | |
| 405 | cg05406595 | GAACTCACTATTCGGGATTCATGCTGGACATGTCACTGCAGCTGCCGCCG | Dog | | | | Human | |
| 406 | cg05746092 | CGGGACAGCATGATGATTGAAGAACTCCTTGTGCCATCCAAAGAGCAGGT | Dog | | | | Human | |
| 407 | cg05954117 | CGGGCCCAGCCGACGCCAGAAGGTCCCAACAGCAGCTGCCCAAACAGTTT | Dog | | | | Human | |
| 408 | cg06190403 | CTCCTACCTCTTCCAAGCAGCATGGTGTGAATGTCAGTGTGAATGCATCG | Dog | | | | Human | |
| 409 | cg06200735 | CGGCTCAGCTAGCAGAGCTAATAGGCTTCTAATTAATTTCCAGAAGATTG | Dog | | | | Human | |
| 410 | cg06254866 | GAAGTCTTTCTTCAGCGGCTTTCTTCTCACCCTGTTCTCAGTAAAGATCG | Dog | | | | Human | |
| 411 | cg06391736 | CGGCGTCGTTAAAGAGCAATTAGATGGAAATTAAGCCGAGAACAAGTATT | Dog | | | | Human | |
| 412 | cg06479220 | AGATACAGCGAGCTGGTGAATGGGGCACCATCTGCGATGATGACTTCACG | Dog | | | | Human | |
| 413 | cg06670018 | GCATAGTTTTTAGCATAACATCTTGACTCCTCGATAATTATATCCGTTCG | Dog | | | | Human | |
| 414 | cg06801233 | CGGAGGCTAGTTCCTGGTGGGTCAGCATGTACTTCTCACACTTAGCTAGT | Dog | | | | Human | |
| 415 | cg06940357 | TAAATACGATTTTATCAGCTCGGAATCTGTTGAAACACATCCATCTAGCG | Dog | | | | Human | |
| 416 | cg13264741 | CTTTTCTGAATTATTTATAGACCGGTACCAGCTGTTTTCAATTCCTCTCG | Dog | | | | Human | |
| 417 | cg07158563 | ATGTGCCATCACGCTGTCTGTTGCTTGAACTCCTGGATGTCAGTGTTTCG | Dog | | | | Human | |
| 418 | cg07211437 | AGACAAATGATTCGAGTCTGAATTCCATATACACCGGAGATTGCTTATCG | Dog | | | | Human | |
| 419 | cg14778330 | GCCCCCAAACCAGCTGTTTACATACAGGAATCAGGTATTGGGGCCCCTCG | Dog | | | | Human | |
| 420 | cg14956305 | CAGATGGTCCCTCCTAAAGGGGCCTACAACGTGGCTGTGATGTTTGACCG | Dog | | | | Human | |
| 421 | cg14956645 | CGAGTCGTTGGGAGAGAGGGCTTTGTAGGTTATAATAAAATCCTTTGAAT | Dog | | | | Human | |
| 422 | cg15436852 | TGCTGAAGCACCTGGTAGACAGGTACAATCTCTACTACGCCTACCTGCCG | Dog | | | | Human | |
| 423 | cg08712844 | TGCTGCCTGTCCTGAGAAATTTATGTCACACCCACTCCATCATCCTGGCG | Dog | | | | Human | |
| 424 | cg09595115 | CGGGCCAGTCTCGGGTTCTCGCTTGTAAACTTTATTGTAACTCTTCCGCC | Dog | | | | Human | |
| 425 | cg09689231 | CGCAAACATATTTCCTTGGTGAAATGTCAAAAAGGCAGCAATCAAAATGA | Dog | | | | Human | |
| 426 | cg15411810 | ACAAAGAGCGAGTGTGGGCCGCGGTGACTTCATGCCTCACCAATGTCCCG | Dog | | | | Human | |
| 427 | cg15436708 | TTTACAGCCCTATAAAAGCTGTAGCGACGAGGCAAGCGCTCCTACCACCG | Dog | | | | Human | |
| 428 | cg09973880 | CGCAGGCACTAGGTTATATAACAGTCTGAATGGAAAAAGGAAGGTCAGAG | Dog | | | | Human | |
| 429 | cg09996908 | GAAAATAAGACAGCCATTGTCCTCGCACGCCAAACGAGGGTTTGATGTCG | Dog | | | | Human | |
| 430 | cg10230808 | CGGCTGATGGATATGAAAAAATAAATTACTGTGGCAAAATGTAATAAACA | Dog | | | | Human | |
| 431 | cg10820794 | GACCCTTAATTACTTGCTAAATTAGAATGGTTTTCTGAAAATCACAAGCG | Dog | | | | Human | |
| 432 | cg17619764 | ATTTCACAGCTGAGCTGTGTATTGCCAGATAAATCAAATCAGGGTAAACG | Dog | | | | Human | |
| 433 | cg11160066 | CGCCTGCAAGTTCAAATGCGGGTTGTGACACCCATCATCATTATATCACT | Dog | | | | Human | |
| 434 | cg11242021 | TTACTGCAGCTAACTTCATAGACGTGATCATCACCCGGCAAATTGCCTCG | Dog | | | | Human | |
| 435 | cg11275402 | CGTGAGAGCCAGTTGGGAGAAACAAAGTTGTGCAGGCCAAGGGCATAAAG | Dog | | | | Human | |
| 436 | cg11339341 | CGCAGAACGTAGTGTGGGGACTGAAAAAGACCGTGGCAATGGATGAACAA | Dog | | | | Human | |
| 437 | cg11396061 | CGTTTCCAAACTGAATAGTCATTGGGCTGCCAGATAATTCAGAAACTATC | Dog | | | | Human | |
| 438 | cg11688874 | TGTTTCCTCGCATACATTACCATCAATGCCCGGCCTGTGAGTGTGTGTCG | Dog | | | | Human | |
| 439 | cg11762593 | AACGTGACCATGTGGATTCAACAGCTTTTAGGACTCAGGTGAGCGACCCG | Dog | | | | Human | |
| 440 | cg11900069 | AATTGTAATCAAGCCAGGCCGTCTCAGCTGGCTGATTAATGAGACCCACG | Dog | | | | Human | |
| 441 | cg11983139 | ATCCCCACCATTTGAGAGCTCACCTTGCAGCAGACAGACATGGTGGCTCG | Dog | | | | Human | |
| 442 | cg12026817 | GCTTAAGAATACGCGTAGTCGAGGAGAGTACCAGCGGCAGGGGGGCAGCG | Dog | | | | Human | |
| 443 | cg18888015 | CGCCAAAGCGCACGGCTCACAAAGGGAGCAAGTAGCTGCCACAGGGAACT | Dog | | | | Human | |
| 444 | cg12238798 | CGCACGCACCTCCCTCTGTGTTGTAGCAATAGGCTGTGTAGTGTCCTGAG | Dog | | | | Human | |
| 445 | cg12250639 | CACTCGCAGTGGTAGCCAGCTTCTATCAAGCCATCTAGAAATGCCCATCG | Dog | | | | Human | |
| 446 | cg17860485 | CTTCCCCTTCGAGGCGCTGTCTCAGGGGCAGCAGCTGTGCAAGGTGCGCG | Dog | | | | Human | |
| 447 | cg12464120 | AGGGGCCCCCGCCCAGGATGGACTGGATGGTGAAGCTGGAGACGCCACCG | Dog | | | | Human | |
| 448 | cg12525832 | CATTACAAAACTCTAATATACACACAGGGAAATTTGATGATTTGACTGCG | Dog | | | | Human | |
| 449 | cg19437021 | CGGCTGGGTGTTATTTAGTGCAATATGAAATCAAATGATCCTATTTCTCA | Dog | | | | Human | |
| 450 | cg12783911 | CGGTTTAAGTCATGTGATTGCAAATAGTAAATTAGTTTCTCGATGTTTTC | Dog | | | | Human | |
| 451 | cg12791206 | GTACCAGGATTATCCCGGGAACTTTGACACCTCGTCCCGGGGCAGCAGCG | Dog | | | | Human | |
| 452 | cg24262627 | CCCCGGGACGAGGTGTCAAAGTTCCCGGGATAATCCTGGTACATGATCCG | Dog | | | | Human | |
| 453 | cg13241538 | CGCCAGGAGCTGCACCGCATTATCAATGACCGGGAGATGAGGGACGCCAT | Dog | | | | Human | |
| 454 | cg20355078 | GCCCGTCTCTTGTCTTTCCTGGTTTATGACTTTCGGCTTTGTGGAATACG | Dog | | | | Human | |
| 455 | cg13326443 | GTACCCTGTGACAATTGGAGGCAAGATCGTGGGCTCCTTGTGTGCCATCG | Dog | | | | Human | |
| 456 | cg13487121 | GATGGCTTTGGGGGCCTTGCTTCCATTTTCCATTATTATGTGGACTACCG | Dog | | | | Human | |
| 457 | cg13499073 | CGGTCGCTAGGAGGCAGAACAAGATCAAGAAAGCTCAGCGAACTTGAACC | Dog | | | | Human | |
| 458 | cg13528652 | CTGGCTGGTTGTACCCATCAGCTTTGCGCTTTCCTCCTACATTTCCACCG | Dog | | | | Human | |
| 459 | cg18994669 | TAAAGCATTATCTTTGGTACAAGTACACACGGCAGGGCATTTTGGCTTCG | Dog | | | | Human | |
| 460 | cg13588645 | CGAAAGGGAATTAACCCCATCACCAGCCCGGACACCGGCTCCAGCGGCAG | Dog | | | | Human | |
| 461 | cg14441435 | CGAGATGGCCGACAGCCCCGAGTTCACCAGCATCCCTGCCTGCTACTGGT | Dog | | | | Human | |
| 462 | cg14456595 | CGGGAGCTTGTTAAATGTTCCTCATTATACATTTCTGGTCTGTTTCATCA | Dog | | | | Human | |
| 463 | cg14503550 | CGGCCAAATGTACTGCCCCAAAGAGCAGGCGCAGCCTCCCCACCTCTGGA | Dog | | | | Human | |
| 464 | cg14523578 | GTTTTTTCAAAAAGACGATGTCTTTCTCCTTGTTGCTTTTTAGTAGGTCG | Dog | | | | Human | |
| 465 | cg27633952 | CGGCTGCAAACCAGGTGTTTTTTTCTGAGGCTGTGTTGACAGCTGCTAAT | Dog | | | | Human | |
| 466 | cg21948411 | CGCTACAGTAATCCAGAATGTGTATTTCTGCAGATGATTAAATCAATACA | Dog | | | | Human | |
| 467 | cg22059823 | TGGGGCAGGCATGCGGCCACTCCATCCTCTGCAGGAGCCAGCAGTACCCG | Dog | | | | Human | |
| 468 | cg22159998 | CGCAACTTATATCTGTTGTCTCAAACAATAGGCTGGACAAGTAAGCCTCA | Dog | | | | Human | |
| 469 | cg15155511 | CGCAACCACCTGGAGAACAAAATCCATCTGTCTGACTGAATCTAGTTGAA | Dog | | | | Human | |
| 470 | cg22582760 | CGCCCGGGCAGATCTGCAAGTTATTTGAATGTATTATTCCAGTACCTGTC | Dog | | | | Human | |
| 471 | cg21098134 | ATTCAGCTTTGGCACCTTGGTATTAAATTTGCATAGCAGGTCACGCGTCG | Dog | | | | Human | |
| 472 | cg15478432 | CGACGACCCCACCAAGCAGACCAAGTTCAAGGGCATGAAGAGCTACATCT | Dog | | | | Human | |
| 473 | cg15618712 | GCTGGTGCTGAGGCTGAGGCTGGGCGTCCTCATGATCGCCTTGACTAGCG | Dog | | | | Human | |
| 474 | cg15652120 | ACTGCATTATTCCCCAGGCGGTGTGCAGTCTGTGTAAACAGGCTTTTCCG | Dog | | | | Human | |
| 475 | cg23095099 | CGAGGCCCCCAGCAGTGCCATCTCTCTCAGGGACGTCAATGTGTCTGCCT | Dog | | | | Human | |
| 476 | cg15686802 | GCACTTTCCGAGGGCGGCTGTACTTGACTGAGCTGCAGAACAGGCACACG | Dog | | | | Human | |
| 477 | cg15856582 | CGCCATCGAAATGACTGGAGCCTAAATCCAGCGCCTTAGACCACTCGGCC | Dog | | | | Human | |
| 478 | cg23693668 | TTATGGGGAAATAACTGTACACTTCTAGCATATTCCTGGCCTCCCTGGCG | Dog | | | | Human | |
| 479 | cg16066439 | CGCATGCCAACAACTCGTCCATCGAGCTGGAGAAGCTGGCCAAGAAGCAA | Dog | | | | Human | |
| 480 | cg16097144 | CGCCCGCCGACCTGCACCTGTCTGTGAAGTATGTAGGGTGGGCAGAAGCC | Dog | | | | Human | |
| 481 | cg16170567 | CGGGGATTGGAGTAGACGGTCAAATTAACGTCCATAGCTCCATTCTGTCC | Dog | | | | Human | |
| 482 | cg16184138 | CGGGAAGAGAATAATGTACTTTTTTATTAAAATGGAAATGACACACTGCT | Dog | | | | Human | |
| 483 | cg16288125 | TATTAACTATTCTGTGCTGTCCTCTTGGATGATAAGATCCGGAGTCATCG | Dog | | | | Human | |
| 484 | cg16754079 | GCGGGCGGTGTTTTTCCCCCTTTAATCCGAATTCACGGGTTTTCCCTTCG | Dog | | | | Human | |
| 485 | cg16793862 | CGCCCCCTCACCCTGGGGCTCCCCACCCGCCCCAGGTGATGCTGCTGCAC | Dog | | | | Human | |
| 486 | cg16882804 | TGAGCAGCTTACGACACTCAGTGAGCAGTAGGTGCCTGTGCAAGCTCGCG | Dog | | | | Human | |
| 487 | cg18678463 | TGCGGTAGGTCAGGTTGTCCACCTTGAGGGAGGTCATACCCTCCACATCG | Dog | | | | Human | |
| 488 | cg17410330 | AATAAATTATCGCTGACACTCCAGTATTTAATTATGCAGCTGTCAGAGCG | Dog | | | | Human | |
| 489 | cg17509850 | GGAGTCGGAGCTGGCGCTCTTCCAGATGTCCGTGCTGTGGCTGGAGCACG | Dog | | | | Human | |
| 490 | cg27029911 | CATTCTCTTCACAGTAAACCTAAGAACACTTGTAACAATTGCCCACAGCG | Dog | | | | Human | |
| 491 | cg17757479 | AGACGGGCCCAAGCCCCCCTTTGAAAGTGGGCATGAATCACAAAGCCCCG | Dog | | | | Human | |
| 492 | cg17957186 | CTACAGGTGCATCACCTGCGCTGTCCTTGCTGGTGGTCACTATAAGAGCG | Dog | | | | Human | |
| 493 | cg17980874 | CGCTGAAGTCCCACACCATGGCCCACGGCATCTTGGGCAGGTCGCACAGG | Dog | | | | Human | |
| 494 | cg18301087 | GTCTGCCGCAGATAATGGGGAATGCCACCATTCCTGGAGCCATATGAGCG | Dog | | | | Human | |
| 495 | cg20271991 | ATGATCTCCTAAATAGTGTCTGTAAATAAAGTCGCCTCTAATGGCAGGCG | Dog | | | | Human | |
| 496 | cg24466113 | CGCAGGGCGGCGGCAACAGCAGACAGACCCTGCTCAGCAGCCACCACAAA | Dog | | | | Human | |
| 497 | cg18797081 | CGGGAACAGCTGGAGATGACAGATCAATGGTTCAATACTCTCAACAGCAT | Dog | | | | Human | |
| 498 | cg27311945 | TACCATTTCTTTCCCATTTTTTGGCCAGAAGGTCATGTGCAAATTGAACG | Dog | | | | Human | |
| 499 | cg26364230 | CTGCCTCCCTCATAAAAGCGGGCATCTGTGGAAAGCAGGTTTAGTTATCG | Dog | | | | Human | |
| 500 | cg19382448 | TGTCAGTCTTTTGTATTTCAGCAGCTGGATTCATTGCTACCATGGTAACG | Dog | | | | Human | |
| 501 | cg19427611 | ACTTCCTCATTGGTATGCCAGCATCATGGATCATGTCAGCCACAGCAGCG | Dog | | | | Human | |
| 502 | cg15852492 | GTGACAAGAATGTCCAGCTCCTCCTTGGAGAACTTGGGCTTCCTCTTACG | Dog | | | | Human | |
| 503 | cg19477942 | CGCCTCCACCGAGGAGGGGATAATGCACTTGAAGACCGCAACATTGCCTC | Dog | | | | Human | |
| 504 | cg21750779 | TGCTGTCTCGGACACCCTGCTGGGCTCTTACCCTGTTGCCCTGGTAACCG | Dog | | | | Human | |
| 505 | cg17794466 | CGCCAGCATTGTGTATAGTTACCATGGAAAGAGTGAGTCAAGTGAAGGGC | Dog | | | | Human | |
| 506 | cg20007005 | CGGTCCCTGATACAGTAGTCTGGAGAATTCTCAAAATACACGAGGTCATT | Dog | | | | Human | |
| 507 | cg20349210 | CGTCGGAAACAGCCGGAAAATAAACACCCTGATGACTAAACGGTTTCTCC | Dog | | | | Human | |
| 508 | cg09313626 | CGTGGAACTCTCCACCAAGGGTCAGAAGAAGGGGCCTGGCCTGGCTGTCC | Dog | | | | Human | |
| 509 | cg22183626 | CGGGAGCCCAGGGACCGCTCCATCACTGGCAGCCATGGAGCCCGAGCATT | Dog | | | | Human | |
| 510 | cg20632980 | CTGGATGATGTCGTTGTTGTTCTCGCCATTTGGGGACAGGGTTTGGGTCG | Dog | | | | Human | |
| 511 | cg20761338.1 | CGTTGGACTCCTGGGCAATCCTAATTGCCTCCTGCAGGGCGAGCTCTGCC | Dog | | | | Human | |
| 512 | cg26932230 | CGTGTTCTGCAGTGCAAAGGGACTTCCCATGGCAACAACAAACTCCCCTT | Dog | | | | Human | |
| 513 | cg21149585 | GGGAGTGACCTTCAGAAAATATATGAAGCAAATGCCAAAAGGTTTTCTCG | Dog | | | | Human | |
| 514 | cg21178109 | CCTGTACAATAGGGTTGTGCAGGTTCTTCTGAACTGGGCCGGGACTGTCG | Dog | | | | Human | |
| 515 | cg21222571 | CGCCAGCGCCAATAAATAAGCCCATTAACCGGCGAAGTTCGAGTTTACGA | Dog | | | | Human | |
| 516 | cg21258436 | GGACTTGTCAGAATTCATTATTGACTGCGAAAGTCACCACCCTCTTTCCG | Dog | | | | Human | |
| 517 | cg21570151 | CGCCGAGGCCGAGTGCCTGGCCGAGAGCCACCAGCACCTCTCCAAGGAGT | Dog | | | | Human | |
| 518 | cg21608404 | GCTTTCTCAGGTTTCTGCTGATCTTGCAGCGCCCAGAAATGGACCGAGCG | Dog | | | | Human | |
| 519 | cg21698790 | CGCCGTCAGCACAACAAACGCACAACACAAGGAGAAACTTGGTGTCCAGG | Dog | | | | Human | |
| 520 | cg21741768 | GCAGAATTAGAAACAATCAGGGAGCTGCCTAATTACTGTCAATTAGAGCG | Dog | | | | Human | |
| 521 | cg21930209 | CGGCTCAAGTTCAACGAGTTCGTGAACACGGTGCCCACCATCGGCTTCAA | Dog | | | | Human | |
| 522 | cg01796316 | CAGATACTAGTCAATATCAAATCATGTAGATGGCGGCATTTTAGGCCTCG | Dog | | | | Human | |
| 523 | cg19912855 | AAATGGAAACAATTTTCATTCATTGCAATAACTCACTGTTCTGGAGATCG | Dog | | | | Human | |
| 524 | cg27569752 | TGTTTCCATAGCTATCCATATAAAAGAGCCCTTGGAATGAGGCTGACTCG | Dog | | | | Human | |
| 525 | cg22443103 | CGGGGTTGTAAAAAATACAGATGCCAAATTAACTGGCTGTGGCACTTGGC | Dog | | | | Human | |
| 526 | cg12774550 | TACCTTCAGAATCTCATACATGTAAAATCGAATATCATAGTCTGTTAACG | Dog | | | | Human | |
| 527 | cg18502095 | GATGCCATCCCAGGCAAAAAAGGCACTCGTGTTCTCATTTGGAACATCCG | Dog | | | | Human | |
| 528 | cg22599383 | GAGCAGCTTGAAAAGCAGGTCGTACGTCTTCTTCGCCATTGGGAGGAGCG | Dog | | | | Human | |
| 529 | cg22718540 | GCCTTTTGTTCCCAGCCAGAAGTTTGCATGCCGGGACCGTGACAGCTGCG | Dog | | | | Human | |
| 530 | cg22837949 | TGGAGCAGTGGTGCCTCCTCAAGGAGCGGCTGGGCTTCTCCCTGCACTCG | Dog | | | | Human | |
| 531 | cg23052275 | AGTCTGTTGTTGTTTATGCCGCAGCGCATAAAAGCTGTTAGCATTTTACG | Dog | | | | Human | |
| 532 | cg20848949 | CGCCCAATCGCCGTATACTCCCCGCATTTAACTTGGATGACATTTTGATT | Dog | | | | Human | |
| 533 | cg23108415 | GTTGTGCATTCAGCTTTTTAATGTGTTCAAAGAGCAGCTCTGACGCATCG | Dog | | | | Human | |
| 534 | cg07588584 | CGGCGCTGGGTCTTTTTTCATAGAAAAAGGTATTAACACATAAGCATCTG | Dog | | | | Human | |
| 535 | cg23777581 | CGGCAGCTGGCCAAACTGCTCTACGTCCACATGTTGGGCTACCCCGCCCA | Dog | | | | Human | |
| 536 | cg25882973 | CGCAAAGGTTACCGGATCCAGGCTGACAAAGAGAGAGACTCCATGAAGGT | Dog | | | | Human | |
| 537 | cg23934404 | CGAGCCGAGGGAGCCCCTTATCCCGGTGACAGAATGGGACAAGCTGGGAA | Dog | | | | Human | |
| 538 | cg24059119 | CGCCTCCCGCGCCTGCCATTAGAGGCGACTTTATTTACAGACACTATTTA | Dog | | | | Human | |
| 539 | cg26105915 | CGATGGTGCTTTGCAAGGATGTATTTATGTTATAATGGCCAACATTTGGT | Dog | | | | Human | |
| 540 | cg26297738 | GTAAATGGAGTTGTCTCTTTAAAGTGCCCCGGTCAGTTCACCACACGTCG | Dog | | | | Human | |
| 541 | cg24512174 | CGCGGCGCCATGGGCTGAAAACTCAACCGAGATGGAATCTCCCAGTCTGA | Dog | | | | Human | |
| 542 | cg24905433 | CGATCAGATGAGTTCCTCTTAGTGCAGGTCAAAAAGGCTAGTTAGCAGGA | Dog | | | | Human | |
| 543 | cg25621619 | ATCACTGGACAAGGTAACAAGGGCCGGAGCAACCCGCTTGTCAACTAACG | Dog | | | | Human | |
| 544 | cg25337652 | CAACACTGTTTTGCCCGATGTAATTGCAGTTTCCATATAAATAATTCACG | Dog | | | | Human | |
| 545 | cg27132917 | TGGTGTCTCTGGCCGGGGACTGGAATTTCATCTGAATGACTGCCCCTGCG | Dog | | | | Human | |
| 546 | cg25520488 | CGGACTCTACCTGTGGCTCAGGCATACCAGGACAACCTGTACAGGCAGCT | Dog | | | | Human | |
| 547 | cg07158748 | CGTGCAAGGCAACCACACTGACTGTGTACTCAGAACCCGGTCTGAGGCCT | Dog | | | | Human | |
| 548 | cg27290535 | CTGAATCAAGCCTTCTAGCCTCCCCGTGTGACGAGTGCAATAAGGTAACG | Dog | | | | Human | |
| 549 | cg25877801 | CGCATGCGAGAGCTCTGTGCGCTTTACAGGACCTCTGGAAGCAACTACTC | Dog | | | | Human | |
| 550 | cg27376149 | CGGTGACACGATTTCTAATGAGCTGCTCAGAGTGCCAGAAAAGAATGCAT | Dog | | | | Human | |
| 551 | cg27290859 | TGCTTTCAATTCATACTGCCAGCTCTACCTCATGCCATTGACCTTTTACG | Dog | | | | Human | |
| 552 | cg27043849 | ATGGGTCACCGACCCGCGGGTGGAATGGGCGGCCTGGGGTTACTGGGACG | Dog | | | | Human | |
| 553 | cg24173251 | CGGGGCCTATGTCTATCCCCCGCCAGTCGCCAATGGAATGTACCCCTGCC | Dog | | | | Human | |
| 554 | cg24244412 | CGTGTCCCTACTGGACTTTTCAAGGGTCAAAGAGCAATGCTTCAATTAAT | Dog | | | | Human | |
| 555 | cg05661521 | CGGCACGGCAACCTTTGCACCACCCACTGCACCTTAAAAAGGGGGAATGA | Dog | | | | Human | |
| 556 | cg13226074 | CACATCTGGTTTAGCTTTAGACATTTTCTGGGATTTTGCCAGCAGCTACG | Dog | | | | Human | |
| 557 | cg07104049 | CGGCTCAGAGCTAATATTATGGCAAAGTAGTAATTATTTCAACAGTAAAC | Dog | | | | Human | |
| 558 | cg18740802 | CTACTAGGCCTGTCATTTCAGCATCCTTCCATCATAACATTGTGGCACCG | Dog | | | | Human | |
| 559 | cg25283972 | GTAACCTTGTGGCGTATTTAATGTAAATAAGGCAGTTATGTTGCCAATCG | Dog | | | | Human | |
| 560 | cg05383437 | CAGTCTTAGAATGAGTAGCAATATCCACGCGAACCATCTCAGCCTAGACG | Dog | | | | Human | |
| 561 | cg00773909 | CGCGCACCAAGACCGTCCTGACATTACTGTTTTATGACCTTGACTTATTG | Dog | | | | Human | |
| 562 | cg17026220 | CCCGGTTGTTTGCAGAAAATTTACAGCTGAGTAATAAAAGTTTACGATCG | Dog | | | | Human | |
| 563 | cg14727354 | GGGGAATAATGCCGTTATTCCTCGGCTCTCAGTTAATGAATACCCTAACG | Dog | | | | Human | |
| 564 | cg21225398 | CGGCCATGACATTAAAAGAGGGGAATGTGTTTTGGCCAAAGGAACCCACA | Dog | | | | Human | |
| 565 | cg17997463 | CGGCTGTGGAATGGCCGCCAAAATCCCAGCTGTGCTGCCAGAACCTAATC | Dog | | | | Human | |
| 566 | cg01460805 | TGGAGCCATGTGCGGCGTGGAGTCCCCGCGGTGGGAGAGGTACTGCGACG | Dog | | | | Human | |
| 567 | cg01322554 | CGGACTTTCCAGCCATCTCCAGCTGTGAGATTATTATAGTTTTTGCAAAC | Dog | | | | Human | |
| 568 | cg02445202 | CGGAGATCTGTGATTTTCATTAAGATCTTTGGAAACATGTGAGGCTTGCT | Dog | | | | Human | |
| 569 | cg01434367 | CGTGCACACACAGCTCCTAATTAGGGGTTGCTGTGCAGTAAACAAAAATG | Dog | | | | Human | |
| 570 | cg18408412 | CCCCAAGTGTGGAAGGTGGTTCTTAGCTGTCAATTCCCTTTTGTTATTCG | Dog | | | | Human | |
| 571 | cg20010041 | CCAGAGTGGAAGTTCCATTCAGGGGGCTCTAAGGCGGCAACCCTCCATCG | Dog | | | | Human | |
| 572 | cg14783226 | GCAGCACGGCTCCGCGGACTTTTTTTCAAACTCCCATCAATGAGACTTCG | Dog | | | | Human | |
| 573 | cg02574410 | CCGCTCCCCCGTCTCTTCAAAATGGATGAATCAAACCAGCCGAAAATGCG | Dog | | | | Human | |
| 574 | cg00296428 | CGGATGCTCAACCTCACTGACCGGCAAGTCAAAATCTGGTTCCAGAATCG | Dog | | | | Human | |
| 575 | cg17189172 | CGCGCTGCAGATCTTCCCCGAGGTGGCCGCCCAGGAGGAGATCCTCAGCA | Dog | | | | Human | |
| 576 | cg07236812 | CAGCAGCCCCGCAGCAGGGAGCTGATGTTGTAGATGGGCTGGCCCTGGCG | Dog | | | | Human | |
| 577 | cg15408129 | ACGCCTTCTACCTGGAGAACCTGCACTTCACCATCGAGGGCAAGGACACG | Dog | | | | Human | |
| 578 | cg00915901 | CGGGTCGGGGGGGGGAAGCCATTTCCAATCTGCTCTCTATCATTTTCAAT | Dog | | | | Human | |
| 579 | cg07661299 | TTAAAATTCATGAATCTCTTCACGACCATTTGTGTAACAAGATTAAGACG | Dog | | | | Human | |
| 580 | cg01193422 | CGCGAGGTCACCGTAAGCTCCTTAATGGACTGTGAAATAACTTTAACTGC | Dog | | | | Human | |
| 581 | cg01333192 | AAGTATATGTGACCTAAAAAGGCATTGCTCATTCTGACACATATACGACG | Dog | | | | Human | |
| 582 | cg01342051 | CGGCATAACAACTATTTGAGGGTTTAATTAGAACATCTGCAATTAAGGGA | Dog | | | | Human | |
| 583 | cg12712815 | GCTTGGAGAGTTCGCAATAGCCTCTTTTCCCACAAGCTGGACCACACACG | Dog | | | | Human | |
| 584 | cg10520899 | CGCCCGGCCCAGAAAGGTACAATAACTGTATATTTTAACTTAATGGTTTT | Dog | | | | Human | |
| 585 | cg12753118 | CCATTTCTGGATTATATTTCAGCTGTAACTTTTAAGTCTAATTATTTGCG | Dog | | | | Human | |
| 586 | cg01938074 | TCATTCTGTATGCTTGACTATTTTGTTTTTAATTTTTCTTCCCTTTCCCG | Dog | | | | Human | |
| 587 | cg12938952 | CGGCAGAAATAAATCCATTCATTTGATCATGTAGTCATTGAGGGCGATAC | Dog | | | | Human | |
| 588 | cg26523389 | GCTGGAGCCTCTGATTGGGTTTCGGAGTCCGGTACTGGAGCCAATCAGCG | Dog | | | | Human | |
| 589 | cg20126035 | CGGGGGGACGAGCAGGCAACAAATCCAGGCCTCCGACATTACCAGAATGT | Dog | | | | Human | |
| 590 | cg02633867 | CGTCAAAATTCAATCACTGGGGGTTTTGCATCAGCCGGGCTACTTATTTG | Dog | | | | Human | |
| 591 | cg02737031 | CGAGCTGACTTGCAGGCATGAGAGATCATCAAGAAAGATAAAGAAATAGG | Dog | | | | Human | |
| 592 | cg21178573 | CGGAGAAAGCACCAATTGAATTAGTTGCCTATTTAGTATCCAAAGCGCCA | Dog | | | | Human | |
| 593 | cg03104256 | CGCTAAGCTCAGCTTGTTTTTTTCCTCTGCTCAACAGTTCTCCTGCCACG | Dog | | | | Human | |
| 594 | cg15343900 | CCAGAAAATAATAAACCTTCCTGGTGGGGTGCAGGGAGCCAAGGCATTCG | Dog | | | | Human | |
| 595 | cg18878759 | CTGCAGCCTGCAAAACGAATTTGGTGCTCTGAATGCACTGGTCTTGGTCG | Dog | | | | Human | |
| 596 | cg22619012 | TTACGACCCAGCAAGAGGCCGAGCTGGTACAATATCCTGACTGTAAATCG | Dog | | | | Human | |
| 597 | cg12026556 | GGTTTCTCCGAAAGCTTACGATGCAATTTCCCCCTCCAAAAAAAGAATCG | Dog | | | | Human | |
| 598 | cg14530571 | CGCTGCATTGGGATACAGATCCATCAGTTCTTCAGCTTCACTCAGATTCC | Dog | | | | Human | |
| 599 | cg05907933 | CGGCATGCTCCGTGCTGGGGAAATGAGATGCACATTTAAATCTCATCCAT | Dog | | | | Human | |
| 600 | cg12990321 | CGGCCGCTGCCCCCCTGCCGCTGGTACTCTCCTCGACTACGCGTATTCTT | Dog | | | | Human | |
| 601 | cg24516716 | CGGCACACTGGGTCCCGAGGAGTTCAAAGCCTGCCTCATCAGCTTGGGTT | Dog | | | | Human | |
| 602 | cg10523202 | ACTTGTACCAAAGATAATGCTTTATGTGAGAATGCCAGATCCATTCCACG | Dog | | | | Human | |
| 603 | cg21451202 | CTCTGTTTGACCAAGCGGCCAAGGTAAAGATCCTGGAGGTGATGCCTGCG | Dog | | | | Human | |
| 604 | cg06721070 | CGGATTTACGAGTGCAAAACATGTGGCGCCATGTTCACCAACTCTGGAAA | Dog | | | | Human | |
| 605 | cg17563106 | CGCTGCTTGTAGCTTCGTCCACAGTAGTTGCACTTGTGAGGTTTACCCAC | Dog | | | | Human | |
| 606 | cg18480320 | ACAGCTTCGCTTTCTGCAAACCACCTTTCAAAAATTTTCTTCTGGAAACG | Dog | | | | Human | |
| 607 | cg18877412 | CGCTTTCAGTTGGGCTGCTCGGTCTAATCTTATTTGTTTTACACCCATCA | Dog | | | | Human | |
| 608 | cg25199827 | AGTGCTTCTCGTTTCAGCAGCACAAGCTACATGTCTGTCCAATCAGAACG | Dog | | | | Human | |
| 609 | cg13570084 | CGATCAATAGCTACCAACATTTATGGCTTAGATTATTAATGTGAAAGCTG | Dog | | | | Human | |
| 610 | cg09370029 | CGCCCTAATTGATAGACAGAAGGCAAAGAGGAGGATTGTTTTTGAACCTG | Dog | | | | Human | |
| 611 | cg19008877 | CTACTGTTGCCAGTATGTTTTCAGCTGTGCCAGAACCGAGCAGGTCTGCG | Dog | | | | Human | |
| 612 | cg17489939 | ACCACCAACATTAAGGAAGAATCCAATTGCTGCATGTATTCTGATAAGCG | Dog | | | | Human | |
| 613 | cg02884952 | CGAATGCAGCTGCTCTTTGTAATTGTTTGTGAAACTGAGTTAAAGGGAGG | Dog | | | | Human | |
| 614 | cg09075948 | CGCTGTTACTGTAAATGTTCCCTCATTATCTATGTTATGGTAGGAATTTG | Dog | | | | Human | |
| 615 | cg08167680 | CGCCTTTCAAACGAGGGCAGTTTGTCATAAAAAACATCGTCTTCTGACAC | Dog | | | | Human | |
| 616 | cg25574114 | CTGGGAGACATGCTCGATGGATGATGGCTTTTAAAATATTCCTAATGTCG | Dog | | | | Human | |
| 617 | cg27643609 | GTGCTGATTTATTGCAGAAGCCTCTGGTCATTTCCATATATTGAAATGCG | Dog | | | | Human | |
| 618 | cg10162464 | CGGGGAACAGCACTCCCAGGATGCAGTTTGTGTCAACACGGCCGCAGCCT | Dog | | | | Human | |
| 619 | cg16390009 | CCCATGTTTATCACCGAGTGAGATGACTAATTACACCTTGTCAATCACCG | Dog | | | | Human | |
| 620 | cg18977436 | TAGGAAAAACGATAATATTCCGGATCTTCTCCCAGTTTTTTCCCCTCACG | Dog | | | | Human | |
| 621 | cg26375445 | CAAATGTGGCTGAAATTGATAATTCCAAAGTGCTTCATTTCGGCTCCTCG | Dog | | | | Human | |
| 622 | cg13160963 | CTCCATGATCAACCTGTCGGTGCAGCAGGTCCTGAGCCTCTGGGCCCACG | Dog | | | | Human | |
| 623 | cg24142628 | CGCGGGTTTCTCGAGGCCTGTTTGTTATTAAGATGTAAATTAAATCATCA | Dog | | | | Human | |
| 624 | cg14044498 | CGACGTGAATGAAGCCTCATTTCTGGCCTTGAGGAGCTTAAGATGTATGT | Dog | | | | Human | |
| 625 | cg07224103 | AATTCACGGGTTTTCCCTTCGCTTTAATGGGGGCCACAGGGACCAGCTCG | Dog | | | | Human | |
| 626 | cg14387950 | GGAAGGAGCTGCGAAAGCCCCCCTTCTGGTCTTGCCTGGGATTTTGATCG | Dog | | | | Human | |
| 627 | cg26647139 | TCCCCGGATTGACAAAACAATCTGGGAGAAGTGCATGCGTGCTTTGCACG | Dog | | | | Human | |
| 628 | cg20314902 | CGGCGGAGTGTCCGGGTGAAAACCAAGGTACCTTGGATGCCCCCTGGAAA | Dog | | | | Human | |
| 629 | cg05066539 | CGCTGGAGCTCCTACATGGTGCACTGGAAGAACCAGTTCGACCACTACAG | Dog | | | | Human | |
| 630 | cg25040028 | GGTCGTAAAAATCGGCTGTCTCTGTAAGTTATCGTATCCGTAAAACTTCG | Dog | | | | Human | |
| 631 | cg24517026 | CGCGCGGTACTTATACAGCAGTACATGCAGAGCAATGCCGAGGTTGTGAG | Dog | | | | Human | |
| 632 | cg07196802 | CGCCGCCTTCATGGACCGCCTGGGCCACCAGCTGGAGGACATGCTGCTCT | Dog | | | | Human | |
| 633 | cg10711876 | AGATGAAGGACGATGTCAGACTCATTTTCAGCCTCATTAGGCAGCAGACG | Dog | | | | | Universal |
| 634 | cg17215796 | GCTAGTACCAACTGCTTGAGACCAGATACTAGTTTGCATTCACCAGAACG | Dog | | | | | Universal |
| 635 | cg27507315 | CGCCATTCAGGCCAGGTCCATTCTGTCATTTATAAAGATAGTTTCTTCTG | Dog | | | | | Universal |
| 636 | cg16437032 | CATCTTTCTAGCTGACTGGCAACAATCTGCCTTTCCACTTCCAGTTCTCG | Dog | | | | | Universal |
| 637 | cg16636772 | CGCCCGCATTTTAGGATACAGGAACAAACACGGATGTGAAATCAAGAATG | Dog | | | | | Universal |
| 638 | cg19111172 | CAATACATTCTATTTAGAGTGCATTACATCACCCCCCCGGTGACGTCACG | Dog | | | | | Universal |
| 639 | cg15713630 | CGGCTTGTTTACTCAGGATTGGGCATTAGAACTCAGGGGAGGCTCTAATT | Dog | | | | | |
| 640 | cg06561106 | CGCTCCCCCGCCGAGCTGGGGTAGCTGATCACTGAGCTGAAACTAAACGT | Dog | | | | | |
| 641 | cg24954807 | TCAATTTTATACGGTCATCAGTCAGGTTGTGAATGCAAATACCTCTGTCG | Dog | | | | | |
| 642 | cg04523259 | CGGCTGCCCAACCTGCTGGGCCACGAGACCATGAAGGAGGTGCTGGAGCA | Dog | | | | | |
| 643 | cg02916332 | GGAAATGCAATAATTTTGCCATAATGGGCTGTAACCTCAATTCGACCCCG | Dog | | | | | |
| 644 | cg13288931 | ACCTTGATTTAATGTCATACAATTAAGGCACGCGGTGAATGCCAAGAGCG | Dog | | | | | |
| 645 | cg09256836 | CCTTTCATTGTCACATTAACACCAGATGCTAAAAATAAGCCTCCAAACCG | Dog | | | | | |
| 646 | cg14935662 | GAAAATGCCTTTAAGGGACAAATACTGTCAGACTGACCACCATCATCACG | Dog | | | | | |
| 647 | cg10586546 | CGGAGCCCACAGAACCAGGAAATCCAGGACACCTCCTCTGAGCTGCTCAT | Dog | | | | | |
| 648 | cg15755108 | CGAAGACGAATATAGTTAAAATGTAATTAAATATGACGGGCTAGCAGGAT | Dog | | | | | |
| 649 | cg12375054 | CTTCCTGCTGGTGAACCAGCACAGCATGGTGAGTGTGTCCACGCCCATCG | Dog | | | | | |
| 650 | cg23743304 | TGCGACCTGCCGGTGGGAACTTTGTCTCCGAGTCGGAGCAGCATGGAGCG | Dog | | | | | |
| 651 | cg08489771 | CGCTCCTTTTGTATCTCGTGATTAAATAAGTGGGGAAAATGGCTTGAAAA | Dog | | | | | |
| 652 | cg20003348 | CGGCAAGATGATATGAAGTAAATCAAGGTACGAGTAATGAAAGACTGAGA | Dog | | | | | |
| 653 | cg20316422 | TATGAGGCAACCCAATCTTTCCTCGGATGGCACTGTTAAATTTTGGTCCG | Dog | | | | | |
| 654 | cg09228164 | GGTCGCTGGAGAGGTGAACCAAAGACACTTCCGTGTGGATTTGGACAGCG | Dog | | | | | |
| 655 | cg09243281 | CGGCATGATTTGGATATCATCAAACGGTTGTTGGACCAGTGTATTCAAGA | Dog | | | | | |
| 656 | cg17583255 | CTTTCGAGAAATGGCTGGGCCATTGTGCAGAAGAATGCCCGGAAATCCCG | Dog | | | | | |
| 657 | cg21645186 | ACGTACTTGGCATAGACATCCAGACTGGCTGTCTCCACAGAGATGTTGCG | Dog | | | | | |
| 658 | cg19654336 | CGGTCCCTCTCACCCGCCTATTGTGTACACAGTGAAGGTCATAGGTTCAA | Dog | | | | | |
| 659 | cg22234098 | ACTCCACATCACCCAGGCTTTGGTAAATGTAGCTGGTCGCTGTATAGTCG | Dog | | | | | |
| 660 | cg00013189 | CGGCGCTCTGAGGCCTCCCCATTCACCCGCCTTGGCACGCTCACAATCGG | Dog | | | | | |
| 661 | cg13804575 | GGAGCCCTGGGAGAAAGCCCCAACTGGTTGGTCTTTCCCCATCCCAGACG | Dog | | | | | |
| 662 | cg17443147 | AGTTAAAGTGCCACAGAGTTTGCTGGCTGCGCTTGCTGGTTGATTTAACG | Dog | | | | | |
| 663 | cg14435444 | CGGCGGAAGACGAGACAACACCTGGCAGCAGCCTGGAATCTGATTTGCTT | Dog | | | | | |
| 664 | cg21921063 | CGGGTATTCTTGGGTGGATAATACGGATTACGTTGTTATTGCTTAAGAAT | Dog | | | | | |
| 665 | cg02393105 | ACCTTAACTCGAGCTCATGTGTGGTAATTGCTTTATTCTGCATGAACTCG | Dog | | | | | |
| 666 | cg12735070 | AGTTTGAATTCCATCCTACATTAAGACTTCTTTCACAGCTATTTAGCTCG | Dog | | | | | |
| 667 | cg05779610 | CGTCTAAACAGGCGCCAAGTTGCTGGCAATGCGCAATTATTTCCTTGTCA | Dog | | | | | |
| 668 | cg21880134 | CGACCTCCGGGTGTTTAATAACCTTCAGAAGTTTCCCACAAAGGCTCAGA | Dog | | | | | |
| 669 | cg26616428 | CGGGTGACAGAGCGTGTGTTGAAGCTGAACTCTATAATTTGCGCTTCTGT | Dog | | | | | |
| 670 | cg19803918 | CGAGCATGAAAATTCGGTTTGAGCCGGCTGACAATACAATGAAAAGGCTT | Dog | | | | | |
| 671 | cg21730656 | CGCCTCTGCTTGCCTTTGATAATTGTGTGCTGACTACACGTGTAAAAAAA | Dog | | | | | |
| 672 | cg26743713 | CATTTCATTTCAAGGGCTCAGCCACTGGTCTGTCAAATCTTCATTTTGCG | Dog | | | | | |
| 673 | cg08164193 | CATCTGGAATTGCGCTGCGCTCACGGCCAAGGCCGATTGTTTAGTCTGCG | Dog | | | | | |
| 674 | cg00193345 | CGCTTTTGGCTCCTTCAGGAATGCGCTGAAGCTTGTAATCAGCTTTGTGA | Dog | | | | | |
| 675 | cg02124022 | AATTGACTGAGGGGCAGGTGAAGCTCCCGCCCCATGCAGGCTCATTCACG | Dog | | | | | |
| 676 | cg02857399 | CGTCGCTGCGCAGGTCTTTTTTGTTGGCCACCAGGATGATGGGCACATTG | Dog | | | | | |
| 677 | cg19608474 | CGATTGAGTTAATCTTTGAAGAAAACAGAAAATACTGTAACAATAAAGGC | Dog | | | | | |
| 678 | cg14001847 | CGGACGCCAGGAAGCACAGGGACAGGTGCAAGGCCTTCAACACCCGCCGG | Dog | | | | | |
| 679 | cg08664231 | CGCCTGGAGGGATCAACACAGTTTTTTAAAGCAAACATAACACAAGTGCT | Dog | | | | | |
| 680 | cg10437271 | CGCTCCGCCGCTCCATGCTGCTCCGACTCGGAGACAAAGTTCCCACCGGC | Dog | | | | | |
| 681 | cg26434265 | TAAAATCAGTCCAGCGCTTTTTTCTCGGCCCCTTCTTTATTGTTGGTCCG | Dog | | | | | |
| 682 | cg25790333 | CGGGAGGAGAGTTTAATTGGTTTAGCCTAAAAAGCCCATTACGCTCTCTG | Dog | | | | | |
| 683 | cg02800396 | GGGTCACCAATGGGCGCGGAAAGTCCTCACTCTCATGGCTCGGGCCATCG | Dog | | | | | |
| 684 | cg12190012 | AAATTACCCACAAAATAAGAACAGGAAGTAATTCAGCACAGCAGAACACG | Dog | | | | | |
| 685 | cg10546888 | CGTGATTACACCCAGATCAACGTAGGCAATCTGGAGTTGAGTGCCAACCA | Dog | | | | | |
| 686 | cg20918588 | CGGAATTAGCCCAGGAATTTCTGCTGATAAACAAATGAAACTCTCAAAGG | Dog | | | | | |
| 687 | cg24359120 | CTAGGGGGCATTTGCACATATATTTGTACTCAACATTTCATGGGAAAGCG | Dog | | | | | |
| 688 | cg20109856 | CGCTAACCATCACTAAACAGTGACAGTAATAACAGCTAATTTTGCTGGCA | Dog | | | | | |
| 689 | cg07189644 | AGCTAAGTTAACCTGATTTCCCTTAATTAAAACATCTTTTCTCGTTTACG | Dog | | | | | |
| 690 | cg22201025 | CGGGTCAGGCCAGCACAGACGGTTTGTACTTCCTTATTGTACATTTTAAG | Dog | | | | | |
| 691 | cg00688975 | GGAGGACTTATTCGGTTCCACGTCAGAAAGTGACACGTCAACTTTCCACG | Dog | | | | | |
| 692 | cg03103218 | CGGGGGACTTATTTACTGGCAAATCCATACTCATTACAAGACTCAGCCTA | Dog | | | | | |
| 693 | cg09574770 | AAAGCGCATATGCAAGCCATGAATTATCAACTGAAAGGAGTCAATTACCG | Dog | | | | | |
| 694 | cg20855763 | GCAGGTTGAGGCGGCGCAGCGGGCCCTGGTGGAGGTGCTGGGGCCTTACG | Dog | | | | | |
| 695 | cg25244901 | CGGGTGGGCTGAATGTGTTGTGAAATGGCGATCATTGCCAGAGATTAACC | Dog | | | | | |
| 696 | cg03472204 | TCGGCACCTGGTTCAAATTTAAGGCTCATTTACACATGATGTCACACACG | Dog | | | | | |
| 697 | cg24396429.1 | ACATGGTTTGCATAGCTGGATCTCAGCTTATCTGTGCCTTTCGGCTTTCG | Dog | | | | | |
| 698 | cg06031500 | CGGCGGACCATCAGCTGCCTCCAGAAACAAGTAATCAAGAATAGGCCTCA | Dog | | | | | |
| 699 | cg24956561 | CGTGCATTTTTATTCAGAGATAATTATGTGTTGATCAGAGAAGTCAGCGG | Dog | | | | | |
| 700 | cg23677945 | GTAGAGCACCATGAAGAGGATGGTGCAGCCCTCCTTCTTGGTGCCCTGCG | Dog | | | | | |
| 701 | cg09637123 | GAGAAGCCGATGTGTGAGAAGACCACCATCAACAATGAGTACAACTACCG | Dog | | | | | |
| 702 | cg23505448 | CGAGGTTAGAGAGGTGAGCAAAGGAAATAATTAACTCATTTGCAGCCTTT | Dog | | | | | |
| 703 | cg14842657 | TTCTAAATAGGCTTAAGGGCTCCATTTACATGAAAAGACAGACAGCTCCG | Dog | | | | | |
| 704 | cg05278305 | CTTTTGAAGAAACCTTTGCAACCTTCACAACTGACAGCCCCATAGTGACG | Dog | | | | | |
| 705 | cg25590275 | CTGAGGATGATTATTAATTAATCAAAAACACTGACTTTTAACTTCCCACG | Dog | | | | | |
| 706 | cg06126658 | AATAAAGTCATTCCACAAGTGACTAAATCTCTTAATTCACAAGGTACACG | Dog | | | | | |
| 707 | cg15031516 | TCAGCAGCTCGGCTGAAGTGGGCCCTTTGGGCTTGTGCACGGCGAACACG | Dog | | | | | |
| 708 | cg15587600 | GGCTTATTAACTCAATGTGAAGCCAGATTAAAATCTTTAATTATAAATCG | Dog | | | | | |
| 709 | cg07340783 | TGCCTAACATGATTCTTTCAGTCATTTATTATGCAGCTGCTACAACGTCG | Dog | | | | | |
| 710 | cg07687140 | CGAGTCGGTGGTTTGTCATAACAGTCATCAGTAACTGTCGCTTTCTGCCG | Dog | | | | | |
| 711 | cg24726068 | TAGATCATAGACACACGGTTCTTGATATACACATGATAGGGGTCACTACG | Dog | | | | | |
| 712 | cg27503226 | CGGGCTCTAATGCACACTGTTTTACACGTTAACGGTTTTGAAGTTCCAGG | Dog | | | | | |
| 713 | cg24383169 | CGTGCCAGCTTAGTGTCAGAGTGCCTGTTCGCCAGACGGCCACTCAGGCC | Dog | | | | | |
| 714 | cg17489311 | AAATGAATTTGACAGCAAACATCATAACAGTTAGCAGTAATGTGTGTTCG | Dog | | | | | |
| 715 | cg26419744 | TCGTCTGTATTTATTTAGTGCTCTGGGGGAGTTTTTCTCTTTACGCAGCG | Dog | | | | | |
| 716 | cg17247323 | TGTCCTCAGTCTTTTTCTGTTAGTTCATTACTACACAATTACCATTCACG | Dog | | | | | |
| 717 | cg01620164 | TTTAGCTCAATAGTCACCAGAGTCCAACCAGACGTGTATGTCGCGCAACG | Dog | | | | | |
| 718 | cg20694166 | CGCTCACGCTGTGTGAGCTCAAATCCTAGCATTAATGTACTGCTGGGTTC | Dog | | | | | |
| 719 | cg06759265 | CGGCCTGGATGGCCCGGAGGTAGCTGTGGCTCCGCATGCGGAAACAGCCG | Dog | | | | | |
| 720 | cg21577422 | CGTGCCCTCCAGTGGCTTTTCTGATTCGCTTTCTGACCTAAACACACATT | Dog | | | | | |
| 721 | cg07846083 | TGAATAAGGCCCTGATTGCAAGATCCTGTTTGGAAAATTATAGTGCGGCG | Dog | | | | | |
| 722 | cg10194942 | CGAGGCTGCTATACTGACTTCCATGTGGACTTTGGTGGTACCTCTGTTTG | Dog | | | | | |
| 723 | cg23024952 | CGCCACAAGCGACACAAATGAACACGCCTTCTCAGCCCCGCCAGGTGAGG | Dog | | | | | |
| 724 | cg13550064 | CGACGAAGGGTTTTGTTACAGCATGTGCATGAAGGCTATGAAAAAGATCT | Dog | | | | | |
| 725 | cg02707033 | CAAACTGACAGAGGGAACGGATGCTCTTTAGTAGCACATGCCCAGGATCG | Dog | | | | | |
| 726 | cg10818013 | CGGCCGGCTCAGCGAGACTGAACTAAAAGTCTCACACTTCATTGAACACC | Dog | | | | | |
| 727 | cg23116266 | CGAAGCGCTTTGTTCAGTGCAGCGTTGCAGAGGGGTTTTCCCAGGCTCCG | Dog | | | | | |
| 728 | cg24015091 | CGACAGTGAGAAGGAAGAAGGTGAAAAGTCTCCCAGCTGAATTCTTGGCT | Dog | | | | | |
| 729 | cg21879618 | CGCCTAAGGCAATAGGACTGTACAATCTGTTATGTACGAGGCTGTGGCTT | Dog | | | | | |
| 730 | cg07645671 | TTTTTTTCATGCTTAAGTCCAATGTGCCATTTTCATCCACTTCTATTTCG | Dog | | | | | |
| 731 | cg25236972 | CGCGGTGGTGCTAAGTTGAGTCATCAGTTCCCTTTACGCCCTAATAATTG | Dog | | | | | |
| 732 | cg07054032 | CGGGCAGCTGCTGATGAACTGGCGGGTGTAGCACTGGCCCCAGCCCTTCA | Dog | | | | | |
| 733 | cg15240113 | CGATGCCGAGTTCCAAGCACCATTGTTAATACAGACCAGAAGAGGAATTG | Dog | | | | | |
| 734 | cg08044276 | ATTTCAAATGGAAAATTAATGCTGAAAAATAGCCCTGAGCTCTCTTGTCG | Dog | | | | | |
| 735 | cg19537997 | CGAGCTAAGCTCCATTCAAGGCCAGGAAAGAAAATGAGCACAAATAAATA | Dog | | | | | |
| 736 | cg21989377 | CGCAGTACATGCTGTGGTTCTCCAGCTCGTGGTCTGTGCAGGTGGAGACC | Dog | | | | | |
| 737 | cg25671487 | CATCTCTTTTATCCTCGCTTATGAATAAGGTAAGAGCCATCCATCACACG | Dog | | | | | |
| 738 | cg09286000 | AATTTATTTTATTGCTTTTATACTTGGCCATTTCCTGTAGCACATTATCG | Dog | | | | | |
| 739 | cg02344882 | CGCTGGGCTCTGCCAAGCGTTGCCTCTGATAATGAGTGGGATTTGGTTAA | Dog | | | | | |
| 740 | cg26924415 | TGCATGGGGACAATGATGCTTGATGTGACAATTAGGCTTCTAAACACACG | Dog | | | | | |
| 741 | cg06035436 | GAGTTACAAGCTTTCTTCCACTGCCATCTGGCAGGTTTACTGATGGATCG | Dog | | | | | |
| 742 | cg17538927 | CGGCTCATTTACGGACTATTTAGGTCGTGCAGTGAGCCAGATGAGAACAG | Dog | | | | | |
| 743 | cg04478143 | CGGATGGGAGGCACTGGGGTCCTCTAGCTCGTAAGTCCTCATGAGACATC | Dog | | | | | |
| 744 | cg01248517 | AAGCGTCTGGATGCCGCACATTTACATCTAACAAGAGACCCCAGAAAACG | Dog | | | | | |
| 745 | cg16698149 | CGAGCTGGAGAATCCCACACAGCTGTGTTGTGGAAATGTTCTCAATTTCC | Dog | | | | | |
| 746 | cg17594003.2 | CGACAGAAGCGTCACGTTGGAAGCTTTTGAGTGATTATTTAATTAACCAT | Dog | | | | | |
| 747 | cg24651108 | GTGTGTTTTGGTGTTGTTTGTGTGTGCAATCTCGTGCCGCTTCCTGAACG | Dog | | | | | |
| 748 | cg13422693 | GGGCTGTGGGGGTCGGTCACCAGCCCCTCGTGAGAGCTCTCTGGTGTGCG | Dog | | | | | |
| 749 | cg23001363 | CGGGGCATGTGTTTACTGTTATGCAGATGAATGCAATATGGGAAGACATT | Dog | | | | | |
| 750 | cg11249940 | CGTTGCCATGGAAACTTCCTGTGCTGATAACAAGGATAATGAGGGAGGTG | Dog | | | | | |
| 751 | cg18361975 | CGCTGGCCATTTGTTGGCAAGTTCATATTTCACACTGCAGGGAATTGAAA | Dog | | | | | |
| 752 | cg24150369 | AGAAACCTTGGAACTTACCCATCAAGTCTCCGCTCATAACGTCCTTCTCG | Dog | | | | | |
| 753 | cg19723283 | CGGGCCAGTAGTCTGCAAAACTCATGGTAATTGTTTGGGTCTGATAAACT | Dog | | | | | |
| 754 | cg27220635 | GGCCATCCTGGGCTCCATGGTGAACGCCTTCATGGTGGGCTGCATGTTCG | Dog | | | | | |
| 755 | cg07697001 | CATTAGGGACAAGCTCATTAAAACCAGCCCTTGGGCAAAAGCAGTTTGCG | Dog | | | | | |
| 756 | cg10091639 | CGCACTTCTCAAAGACCAGAGCTAACAGAGGAAACAACGGGTGCCTAACG | Dog | | | | | |
| 757 | cg05917570 | CGAGTTATGGATTTATGGTCCCGGTCAAGCTCAGCCCATCCCCAGGCAGG | Dog | | | | | |
| 758 | cg06760134 | TCACACTCTGATGACCTCTTCTCCTCATTAAAACGTTCCCAAAGACAGCG | Dog | | | | | |
| 759 | cg16693246 | CGGAAGAGTAATTTGAATGAAATTACACTTGACAGCCTGTCTCCAAGCAA | Dog | | | | | |
| 760 | cg20473430 | CGGCAGGAGGTGGGGATGAATTAAAAACCATAAAATTGATGCTATCACTC | Dog | | | | | |
| 761 | cg15003065 | AAATGCACACACAAAGCGGAGCCCGGGTGAGAGGTGCCTTGTCAGAGGCG | Dog | | | | | |
| 762 | cg16565701 | CGCAAGCAGCATAAAATAGTGTTTAAACAAATATTGTATTGGCATGCTCA | Dog | | | | | |
| 763 | cg06627238 | TTCTCTTTCACAGTAGGCAGCAGAGCATATGGTTTTCTCTTAATGGAACG | Dog | | | | | |
| 764 | cg11464227 | GGTCCTGCATGTGGGTACGTACCAGCATTGTCCTCAGCTTCACAAAGTCG | Dog | | | | | |
| 755 | cg14765612 | CGAGAGTTCTGAGCAAGGAGATTTAACCTTTCAGCAAGGGGATGTGATTT | Dog | | | | | |
| 766 | cg08178288 | GATGCAGTAATTATTTTCGTATTTACGCCATTAACGATTGTAATTTAACG | Dog | | | | | |
| 767 | cg23954711 | CTTCAGTGTTGCCCTGGAAACTGTCCACCTTGTGATCAAAACTGTGGACG | Dog | | | | | |
| 768 | cg16314644 | CGGTGGTCGTGAATAAAAGAGAAACATTCATTTATGGTAATTGGTTTCAG | Dog | | | | | |
| 769 | cg05971481 | CTGATCATAAAATAACTCAATGGAAATGTGTAACTGCCTCAGGCAGCTCG | Dog | | | | | |
| 770 | cg19977633 | GTCACCTCTCATCACCATAATATTTACATCAAATGCAAAAGGCCTCCTCG | Dog | | | | | |
| 771 | cg22877608 | CGTGAATCATTCCATCACAATGTCCTTATTGATTTCCACAGGAAGAGGAT | Dog | | | | | |
| 772 | cg01334218 | TGATTTGTCAGGTCTGAAGCTTTGACGTGCCCAAGGGGCAGACCCCAGCG | Dog | | | | | |
| 773 | cg24862511 | TGAGGGATATTTACAAAGCTTGGATCCCGTGGTCCAACACTGACGAATCG | Dog | | | | | |
| 774 | cg14550267 | CGTGGTCCACCCAGGGATGTAAAACTGTGCTTACCGATGCATCCCATACG | Dog | | | | | |
| 775 | cg20429727 | TACTGCAATCCTTCCCACCTTGTTTTCAGTATTTCTTAATCATTAAGTCG | Dog | | | | | |
| 776 | cg24183320 | CGACTAAATAAAAGAATAATGTTTACTCAGAACTGATGTACTTGTTTAAA | Dog | | | | | |
| 777 | cg22391226 | GCTGGTTGTTGAAGACCTTGAGGCTGCAGCCGCTGGGGATCTTGCAGACG | Dog | | | | | |
| 778 | cg08471214 | CGCCTGAAATTCAAATTAGAGTTTTGCTGAAGCTGCTAAAACTCATCAAA | Dog | | | | | |
| 779 | cg24207053 | CTAATTATTGTGTTGTTTTCAGAGCAAATATGTCATATCCATGGCGACCG | Dog | | | | | |
| 780 | cg21603434 | AAGCCTTCTGATGCCATCGGTTCAATCACAGTTTTTACAATATCATCACG | Dog | | | | | |
| 781 | cg13219590 | CGCAGACAGTTTAGTTATGCAAATCTGATTGATCGAGAGCATATTGCAGG | Dog | | | | | |
| 782 | cg13667241 | TGCCGCTGTATTAATACACATCAGGGGCCAGCTCCTAGCACTAAATCACG | Dog | | | | | |
| 783 | cg09711459 | AGACAAAAAGATTTTGTCTCACTAAACCTGTTTATTGACCAAAACTGTCG | Dog | | | | | |
| 784 | cg15122264 | CGTTGGCAAGAGCGTCATCAGAGTCAGCTGGGAGTGACAGGCATGTTCTA | Dog | | | | | |
| 785 | cg10190711 | CGCTCTGTTAAAGTTTGAATTAATTTTTCCCATGGGTTTGTTCACATTCT | Dog | | | | | |
| 786 | cg06487902 | GGCCGGTGGGGCAGTCCTTGAGGAAGCCCTTGTACCACTCCTGCAGCTCG | Dog | | | | | |
| 787 | cg27594013 | CGACTGGGTGCAATGATAAATTATGAATTTTCTAATTTGCTGCATAATGA | Dog | | | | | |
| 788 | cg15613148 | GTTCTGAAGAAAACTGGTAAGCTGATCTCTTCATGTAATAACTTCTCCCG | Dog | | | | | |
| 789 | cg25836137 | GCAGTGTGAAATATGAACTTGCCAACAAATGGCCAGCGTGCTGTGCCTCG | Dog | | | | | |
| 790 | cg18952493 | GGGGGTGGAGAGCGGCTCCACGTCTTGATGACAATATGCCATACTTGACG | Dog | | | | | |
| 791 | cg16188689 | ATTACCGTCTTTGTTCATGTTGACTTCCAAACACTTCTTCAGCCGACACG | Dog | | | | | |
| 792 | cg08235698 | CGTCGTCAGTAAACTGTTGGCAGGATACTGCACCAGAGGTATACTTTTTA | Dog | | | | | |
| 793 | cg02886263 | CGCAGGGAAAATGAGGGACTTTTGGGGGCAGATGTGTTTCCATTCCACTA | Dog | | | | | |
| 794 | cg10122105 | GCGTCAAGGGGGCTCTGGAGAGCCATTTCCTCAAATGCCCCAAGCCCTCG | Dog | | | | | |
| 795 | cg19880080 | AAGAGGTGAATGCGACCGGCAAAGCCATTGCTCTCATGATGGCTGGCACG | Dog | | | | | |
| 796 | cg27276953 | CGCCACTATGTTGACAGGCTATTTGACCCTGATCCCCAGAAAGTTCTACA | Dog | | | | | |
| 797 | cg17860762 | CGCAGATTAAAATAAAATAGGGACTTTGCCGATGGATGGAAGTGGTAATT | Dog | | | | | |
| 798 | cg26739848 | TATGGTCATGAATTGTGGGCAGCACTACTGCCCCCTCACCTGATACACCG | Dog | | | | | |
| 799 | cg18741172 | CGAGACATGGTTGTCGAGAGCTGGCTCATGGTCCTGTTAAAATTGATGAA | Dog | | | | | |
| 800 | cg01938167 | AGTTATCAATAACATTTCCAAGGTTTGTTCCTTCATCCAACAGGCCAACG | Dog | | | | | |
| 801 | cg03568747 | GCGACCACGACGACAGATTGTCTATCCTCTGGAAAAGCTTGGCATAAACG | Dog | | | | | |
| 802 | cg19038076 | TGTTCAATCTACTGACATTAATGGCTACCTCATTAATCATAGCATTCTCG | Dog | | | | | |
| 803 | cg03266055 | CGCGAAGTGTGAACTCTCAACAGAAGGAAACATGAGACAACTGAAGTGCC | Dog | | | | | |
| 804 | cg12698769 | CGAGGGCACCATGTAGCACAGCTGGACCCCCTGGGGATTTTGGATGCTGA | Dog | | | | | |
| 805 | cg10040343 | CGACTGGCCGCCCTGAGCGCAATTCAATTCAACAGACATTTACTGAGTGC | Dog | | | | | |
| 806 | cg00724865 | TGTTTAACTTGCCTTTTTTACTTCTACAAATTATATTATGAAATCAGACG | Dog | | | | | |
| 807 | cg15801833 | CGGCAGCTACCTGGAGAATGGGAAAACTGATGAGTACAGTCTGTTGGGGA | Dog | | | | | |
| 808 | cg20813565 | CGCTTTTTTGGTGTGGTCTGTCTGGATAAAAGCGTGGCATCACCATAATC | Dog | | | | | |
| 809 | cg22058025 | CGACTCCTGCGAGCCCTTGTTCTGTGTGATAAGGCAATCTCCTCCGGGAT | Dog | | | | | |
| 810 | cg17421372 | CGGCTCCTGCTTCTGCTGCTGAGGTTCCTCCGCCGCCATCTTTAAACAGC | Dog | | | | | |
| 811 | cg16366997 | CGCTAATATGATGGATGTCAGTATCAACATTCAGAGTGATCTCGACAGGT | Dog | | | | | |
| 812 | cg26638661 | CAACACTGTGGCCCCAGCAATCGAAAAGTAATTCCAGCCCCATAGAAACG | Dog | | | | | |
| 813 | cg05268271 | CGAGGTCACCAAGTTGTGGTTACCAAGGCAACGTCACATCTAAGAATATG | Dog | | | | | |
| 814 | cg21739934 | GGCCTAATCAGTTAATACTGATAAACTGCCAGCAATAACTGCCAATTGCG | Dog | | | | | |
| 815 | cg01757168 | CGCTCTCTGAAAGGGCTCCGATAATCTGGAAGGCAGAGATAAGGAACACC | Dog | | | | | |
| 816 | cg05774801 | CGCCGGCCTGCTCCAGCACCTCCTTCATGGTCTCGTGGCCCAGCAGGTTG | Dog | | | | | |
| 817 | cg05046398 | CTTCTAGGCAGAGGTGGCATTTTGCTTTGGCTGTGACAACAGGCAAACCG | Dog | | | | | |
| 818 | cg14311946 | CACCCAACACTTTTGCTTTCTTCTCCATCTCTGAAGATCTGCTCAAGACG | Dog | | | | | |
| 819 | cg02512248 | CGGCTGGTGTTGATTCTTAATAAGTGACTTCCTAAAGCTGAGGCATGGGG | Dog | | | | | |
| 820 | cg06354898 | CGGTGCATGCCTGGCTTCTGGCCTCATACCCAGCTCTATTCTCTGCACAC | Dog | | | | | |
| 821 | cg23039301 | CAGGAACAGATTTTTAATTAAATAAATAGCTGGGTCGGCAGGCAGGTGCG | Dog | | | | | |
| 822 | cg21031345 | TCTGATTTCACGCTCACACATTAACGAGAGCTGACACTGGAGATTAGACG | Dog | | | | | |
| 823 | cg06337299 | AAACAGACGACTCCTTCTGGAGCCAGCTGGCGATGTAATGCAATTAGTCG | Dog | | | | | |
| 824 | cg21202493 | CGTGCCACTGATTATAAATAGTCCATCAGCTCTGCCATGTGTCATCAGCC | Dog | | | | | |
| 825 | cg13264155 | CGGGGAATGCAAATATTTATTTTTCGATTGTACTTTTGCAGGTGATTGCC | Dog | | | | | |
| 826 | cg00993368 | CGGCCACGCTTTATTAAATTCTCATAAACCTGTCAGGGGGGACAGGGCTC | Dog | | | | | |
| 827 | cg24206172 | AATTACTGTAACCATACTGAATAAAAAATACTGCCAAGAACAAAAATACG | Dog | | | | | |
| 828 | cg13279750 | CGGAGCCATCACATGATACAGGTCCCCCATCATGTGATGAGACAAATCTG | Dog | | | | | |
| 829 | cg04220619 | CGCTCTGTTTTTTGAGGAACCTGAATGAACCTGAAAGCAAAGACCGAGTG | Dog | | | | | |
| 830 | cg05347535 | CGCGGGTGGCTCTCTGCAGGTGTCAATTTATTCCAGAGATGAGGACACAG | Dog | | | | | |
| 831 | cg22762903 | CCCTGTTCTAACGACTCTCCTTATTACCTGACAATCTATCTGAACTATCG | Dog | | | | | |
| 832 | cg25831888 | CTTTAAGTGATCTGGCTGTGAACTGTTCAAATCTCTAATTACATTATACG | Dog | | | | | |
| 833 | cg19761677 | CTCCTGGCCCAGCTTGCTGGCTGCTGGGCCGGGAGGGGCTGCCAGGCTCG | Dog | | | | | |
| 834 | cg06774176 | CGGGGGCCAGGGCCTGACACAGACTTATTGGATTTCACGGTGTTTTGCTG | Dog | | | | | |
| 835 | cg09222634 | CCGAGATATTACATTGTTTCTGAGTGAAGCTAAAATCTCTCCCTGACACG | Dog | | | | | |
| 836 | cg12399476 | CGGTTGACGACACATGACAAACTCAGCTATATGGAAACAGAATCTAGGTT | Dog | | | | | |
| 837 | cg06282832 | TTTCAGAGCCAAGAAGATCAATGCGTTCATGCATCATGAATTAGGCTCCG | Dog | | | | | |
| 838 | cg24806294 | CGGACGGACGGACAGACCTCCTTCCTAAGCACAATAGCACCAGCTCCCCG | Dog | | | | | |
| 839 | cg00713411 | CTGTGGCATGTTCTGCCCGGTGGAAGGGTCCTCGGAGAACAAGACCATCG | Dog | | | | | |
| 840 | cg25670404 | CGTTCTGTTCCCACTAATGGCTTGGGGTAGGGCAGCCAGGTCTTACAAGG | Dog | | | | | |
| 841 | cg03990706 | CAGGATTTACAAGCAAGACAAGAATTTCTCATTAAGTGCACATTAACACG | Dog | | | | | |
| 842 | cg05357078 | CGGGGAAACCACATAAGCCAGAGAGACACTCGCATCTGAAACCAAAGAAA | Dog | | | | | |
| 843 | cg21538469 | TTTAAACAGGTGGTTTCCCTTTAGTGGAATCACTGAACTGGTAAATAACG | Dog | | | | | |
| 844 | cg18468479 | CGAGGGGTGGGCTGGTATCTCAGAAAGTGCCTGACACACTAACCAAGCTG | Dog | | | | | |
| 845 | cg03436411 | CGAGGAAACTTCATCTTGAAAATGAACTTAGATGAGATGGTGCCGGTGGA | Dog | | | | | |
| 846 | cg20747487 | TTAACTGTGAAATTTTATTTCCGTTAAAAAGCAAGCCTGTAATCAAAACG | Dog | | | | | |
| 847 | cg25928579.1 | CGGGGTCTCTAATGGATGCAAATGATCATGAAAAGACAGTGCAAAATATG | Dog | | | | | |
| 848 | cg27394581 | CCCTTGCTGGCCAGCCGGCTGAGGATGCTGCGCTCGGACATCTGAAGGCG | Dog | | | | | |
| 849 | cg25370017 | CGAGGTCAGAGAGACCCTCAGTGTTAGAGCCGTAAATCCTGACATTATAA | Dog | | | | | |
| 850 | cg27299890 | AGAGATGCATTTGTGTTGCCTCTGGGTACACTGAAAAGCCACTTAAACCG | Dog | | | | | |
| 851 | cg24566573 | CGAAACTGGGGAGACTTGGAAAACGCTGAGGCCAAACTTTCGATATTGAT | Dog | | | | | |
| 852 | cg03773588 | GCTGTCAGCCTGTGATGGATTCCTCACTTACTTCAATGAATGTTCTAACG | Dog | | | | | |
| 853 | cg02918319 | TTATTGGAGTCCCGAACAAAAGGTGTGGTAGGAAGGCGAGGTCCCCTGCG | Dog | | | | | |
| 854 | cg26504436 | CGCTGGTAGAAAATTCATTTTAGATTTGCTATTTATAAAGTACTCAGTAC | Dog | | | | | |
| 855 | cg24936113 | CTAGGAGATCAGGGTGACCTAGCCTTGCCCTGTAGCTTCCCTCTTAGACG | Dog | | | | | |
| 856 | cg25473687 | CGGAATGAATTTATTACTCTTGCCCATGTGAATCCCCAGTCATTCCCAGG | Dog | | | | | |
| 857 | cg14444871 | CGAGGATGCAAGCAGATCACTCGAAAAGCCTGCGAGCACTTCATCTCAGA | Dog | | | | | |
| 858 | cg02188837 | GAGCATGGGACAAATGACAGCATGGCCTGAATGCAGCCCAGACGTCATCG | Dog | | | | | |
| 859 | cg19226790 | TCATGATATTAAAGCCGTGTCAATTAATTTCTCCCCCTGCTTGATAAACG | Dog | | | | | |
| 850 | cg23585860 | CGCCAGCCTCGGCGCCTGGACTCGAGCCATTGTCGCCTTCTAGGGACCCC | Dog | | | | | |
| 861 | cg21067017 | CGCGCTCATCACCATGGCCATCCTGCAGAGCCCGCAGAAGAAGCTGACCC | Dog | | | | | |
| 862 | cg05709691 | CGGTTCCACGTCAGAAAGTGACACGTCAACTTTCCACGGCTTTGATGAGG | Dog | | | | | |
| 863 | cg14805279 | CGGCTGGCTATGACAGCAGGCACTTAATTTGCATGTTCGACAGACAACAA | Dog | | | | | |
| 864 | cg27461453 | CGTGGTGCTTTGATTAATGATGCTGGTGGGACTCCCAGAAGACCAAAGAG | Dog | | | | | |
| 865 | cg22283959 | CGATGGGGGTTTTACCTACCAAACGGACGAAAAACAATTGCTCTATGACT | Dog | | | | | |
| 866 | cg23779125 | CGCCTCCTTGTGCTTGGACGAGAACTGGAAGGTGCCCTTGTCCTTGTCCA | Dog | | | | | |
| 867 | cg21056360 | AAATTTTGATGGTGCCCTGCTTCTAATATACATTGCAGTAATTAGATTCG | Dog | | | | | |
| 868 | cg17803853 | CGGAGACTAACCATAAATCATGTCTTTGAATCACTGACAAAGATAAAGGA | Dog | | | | | |
| 869 | cg22253511 | CGAACTGCTCCACAGTGGCAGCCTCCTGTGTGCTTCACCAGGCCCTGGTA | Dog | | | | | |
| 870 | cg24763772 | ATATATCACAGTGTTTCCACATCAAAACTGATGGCAAAGTTACATGTCCG | Dog | | | | | |
| 871 | cg05032451 | TCTGCTGGGTCCGAAGATCCCTGATGCCAGATGCTTGATCTCTGATGGCG | Dog | | | | | |
| 872 | cg27146637 | AATGTGTTTCCTGTTGGTCTAGCTCGAAAAACTCTTTGCTTCCTCCTGCG | Dog | | | | | |
| 873 | cg07425396 | TCCCAGGAAACGAGGCCGTCCTCATTGAGGTCATGCCCCTTCCACTGTCG | Dog | | | | | |
| 874 | cg06892949 | GGGGACCAGGCATCAGATTGGAGTCAAGATTCCGAGAGTGTCATTTGCCG | Dog | | | | | |
| 875 | cg20769452 | CGGAATGCCATTTAATTTTTCCGAATGCAGTCCGTCATTAGGAATCTTAG | Dog | | | | | |
| 876 | cg22464003 | CGGGGATCCAAAGGAAAGTTGGAAGCCATCATCACACCACCCCCAGCCAA | Dog | | | | | |
| 877 | cg15869291 | AAATATCAGTTCCCATACTAAATTTTTATCCCTGGCTGATAAATATGACG | Dog | | | | | |
| 878 | cg15079402 | TCTCAGCATCACATCTTCTGTGCTCTTTATTTTTGCCGGACCAGTTTGCG | Dog | | | | | |
| 879 | cg09771641 | CCTGTTACAAACTGGTTCTGTCACCACAGAGACTTCAACTGATCACCTCG | Dog | | | | | |
| 880 | cg02498174 | TGGCCCCATTCCCAGAATTTAACAGTAGGGGCCTTGTGAAATGCTAAACG | Dog | | | | | |
| 881 | cg22806872 | CGCTGGTTGCACTCATGGCTGCATGACTCCTCCTGCATCCCAGCAGCACC | Dog | | | | | |
| 882 | cg06624763 | CTGTCAATCCAACACTTTTAGGGTAATTTAACTTAATAATACCTTTGTCG | Dog | | | | | |
| 883 | Cg03596170 | CATCAATTACTCTTCCACACAAAACAGAAACCTTGTAAAATTTATTTTCG | Dog | | | | | |
| 884 | cg13003121 | AGCAATGGCCCTTCTGTGGTCAGAATGGCACATTCAGCAGCAACTATTCG | Dog | | | | | |
| 885 | cg22763835 | AAAATATCAATGATATCATTCTGAATTTTCTGTTCATCACTATCCAAACG | Dog | | | | | |
| 886 | cg17162734 | CGCCCTGGGGGGTGGCATATGGCGCCCTGTCACCTACCCAAGAAAAAGAA | Dog | | | | | |
| 887 | cg03635671 | GCCATGTGGGAAAGACATTAGTGCCGGCCGCCCTGCCAGCCAGGAATGCG | Dog | | | | | |
| 888 | cg06626742 | AACAATACAGGTTCAACAGGAGTTCTCATCGGTAGTTCATTTTTCAAACG | Dog | | | | | |
| 889 | cg26625726 | TCAAATGATTTTGCAAGCCGAATCTGGACTGTGGATGATTATCGATTACG | Dog | | | | | |
| 890 | cg16593601 | AACGGGGGATTAACAGGTATTTGTCTCAGCTAATTTCACTCTCTATACCG | Dog | | | | | |
| 891 | cg02684102 | CGGTTCCTGTCCTCTGTGATAGTGAGTTTTAAAAGGGAAATCTCCAAAGA | Dog | | | | | |
| 892 | cg05039637 | CGGGCTGTTGGGTAGGTTAACACCCTTCAAGGCCTCTTTCATGTCCAATA | Dog | | | | | |
| 893 | cg26166546 | CGTCCTTTCGTGTGCAGAAACCATCGATTATTATGGGGAAATCTGTGACA | Dog | | | | | |
| 894 | cg07588875 | CGCCTCCTTCCTGTGGGAACCATCCCCCGCTGGAGTCATCTCTGGTCATA | Dog | | | | | |
| 895 | cg07254551 | ACAGGGGCCCCGCTGGGTCAGAGTGAGGAGCTGCAGCCACTGAGCCAGCG | Dog | | | | | |
| 896 | cg06283343 | AATGTGACTGCATGTTCGAGATCACTGCCTCCCATCTGCAATTTGTGACG | Dog | | | | | |
| 897 | cg27066705 | CGAAAGTTTGGCCTCAGCGTTTTCCAAGTCTCCCCAGTTTCGATTGTTCT | Dog | | | | | |
| 898 | cg19518854 | TGACTATTTGCATCATTGCTACACCTGTAAAATGGATAAGCAAGCATACG | Dog | | | | | |
| 899 | cg25365217 | ACTTATGATGACAGTCTATTTATTTTGCTATAAACCCTCAGCACGTAACG | Dog | | | | | |
| 900 | cg06166628 | CGACTGCATCCTGGCTGATATTTGATAATAATTTTAACAGATAAATGTAG | Dog | | | | | |
| 901 | cg21074294 | CGTGGGCACATAATTGATCCATTTGGAGAAAAAAAATGACAGTGCTCTAA | Dog | | | | | |
| 902 | cg10727440 | CGGCTGACCACCGCTGACTTCTGTGAATATCCCTTTCAGGCTGAGGACCG | Dog | | | | | |
| 903 | cg11067179 | CGGCAATCTGGCACTCATCTGTGTCCACACAGCGGTGCGGATCATCCTCC | Dog | | | | | |
| 904 | cg09922950 | CGCTCTGGGAGAGGAGAAAGTTGGCAGAGAGAAGCCTAGCAAATATATAA | Dog | | | | | |
| 905 | cg07397105 | CGCTGCAGCACAGAGATTTTCTCTGAAGCCAGCTGGGAGCAGGTGGATAA | Dog | | | | | |
| 906 | cg03761238 | CGGGAAAATGCTGCCGAATTCATTTAGCTGCTGAGTGTTTTGATCTGGGC | Dog | | | | | |
| 907 | cg18870419 | CGTGGCATCTCAATCAGCTGTGTTTAGATGCTGCTGTGACACAAGATTAT | Dog | | | | | |
| 908 | cg15713442 | GAGCCTGTGGGACACCAGCCGGGCCGCTTTATCTTCTTCATTAAAGTACG | Dog | | | | | |
| 909 | cg14091483 | GTCATGGCTGTTAGTGGGTACTCTCCATAGGTGGTCTCTAGGACTGGCCG | Dog | | | | | |
| 910 | cg27508620 | CAGGTCAGTTTTGTTACAGAGGCCAATTAGCAGTGCTACCTTCGCCTGCG | Dog | | | | | |
| 911 | cg17296202 | ACCAAACCATGTAAATTTACTTTGTTCTCAGCTATGTTTCCAATTTCACG | Dog | | | | | |
| 912 | cg18623536 | TTTTATCAGCAGCAAGCAGGCCTGATTACTGACAATTACACTCTGATCCG | Dog | | | | | |
| 913 | cg22763788 | CGGAGGAATTAAGCTGTAAAAATTACCTGCAGTAATTTGGAAACATTTAG | Dog | | | | | |
| 914 | cg17881605 | CGGGGGTTCATAATTTTCTGAGGTTGTTTTGATAGACTTATTGTGCGGAC | Dog | | | | | |
| 915 | cg00267482 | CGGCAACTTCCTGCTGTTTGGCGAGTACACAGTGCAATGCAGTATGTCTG | Dog | | | | | |
| 916 | cg11972313 | CGCCGTATTTTTTGTCCTGCAAATGAAATTCATTGCTGCCGGTTAGTGAT | Dog | | | | | |
| 917 | cg13756118 | TCTCACCTCTAGAGGTGGTCCCTCCAGGTCAGGGTTGAGGCACATGGACG | Dog | | | | | |
| 918 | cg20092344 | CGCTGGCTTGTGCCCAGGACTTTACCCCGCTTGGAACCAAAGGAGTGTTC | Dog | | | | | |
| 919 | cg06587088 | AAACAGGGCCTGCGCGCCTTAATTACATCTGATTTTTAATTCAGAATACG | Dog | | | | | |
| 920 | cg13679010 | GCCTCTTGTTCCCCGTGTAATTTGCAGCCAATCATCAGTAGGTGTCCACG | Dog | | | | | |
| 921 | cg25019647 | GTACTGTAGTTTCTCATGGAAACACTTTGTGAAAAGCCAGTCGTATATCG | Dog | | | | | |
| 922 | cg13888366 | CGGGGGCTGGTTTATCAAATGTAGCAAAGTGCAGGTTGAGAAAGTCAGAA | Dog | | | | | |
| 923 | cg19272215 | GTTGACGTGTCACTTTCTGACGTGGAACCGAATAAGTCCTCCGTGGTACG | Dog | | | | | |
| 924 | cg25731101 | CGGTTAAGCAAATTATGAGGAGGGGGGCGATGTCCTCACTCTAATAATTT | Dog | | | | | |
| 925 | cg10325143 | CGCACACATACCCGACCAAGGCCTCAACTCTGAGCAAGAGCTAGGAAGGA | Dog | | | | | |
| 926 | cg12376071 | TCCTCTGCCAAATCATCCAATAATTAAGTTTTATGTTATTTGTATGAACG | Dog | | | | | |
| 927 | cg12935694 | TGGTGGGTGAAAATCTATCCTGGATAACTCCTGGACCAGTACCAATTCCG | Dog | | | | | |
| 928 | cg20962788 | CGGTCATGTGTGTATTTTTTCATAGTCCCACCTTGGAGCATTTATGTAGA | Dog | | | | | |
| 929 | cg10560122 | CGCTGCCGCATCCTGACTGCTCCTGGCAACGGGGTCCCGCAGCCAGGCAG | Dog | | | | | |
| 930 | cg15660755 | CGGTCCCTTGTGGTCAGCCCTCATGAAGACATGAGAACCTGGCTCAAGTA | Dog | | | | | |
| 931 | cg26490921 | CGCAGCACGCCAGCCTAAGCTGAGAGCTGTAATGTCATTAAATTGCAAAT | Dog | | | | | |
| 932 | cg19355530 | CACGTCTTTGGCGGCGCTGATGCCATCCTCTTTGAGGTTTTTCTCAATCG | Dog | | | | | |
| 933 | cg25467381 | TGTGGGATGTTCAGAAAGTTGCCGTCCCGGGGTCCGATGCTGACAAACCG | Dog | | | | | |
| 934 | cg24025580 | CGACTCTACCTCTCTGAAAATTGGATCTGCTTCTACAGCAACATCTTCCG | Dog | | | | | |
| 935 | cg05094019 | CATTTCTGTTCTTCCTTGCAAGATTGTGAATGCTTCGGCCACTCCAATCG | Dog | | | | | |
| 936 | cg18643010 | TGATTCTGAATGAAAACAAATTGGCCCGCTTTCTTCTCCAAACAGACGCG | Dog | | | | | |
| 937 | cg19268153 | AAATTCAGTTTTGAGAGTAAACTCTCCGCATTTTCCACCAAAACATCCCG | Dog | | | | | |
| 938 | cg22671203 | CGTCTTGCTTGCCAATTGCCATAGAAATCTTAACACACCATGAAGATTGT | Dog | | | | | |
| 939 | cg19542597 | ACCCACGTCATGACCACAGGTCTCAATATAAAATTATAGAGAACACAGCG | Dog | | | | | |
| 940 | cg25986664 | CGATAGTCTTGACCGAGAATGCTGCCTTGACGTTCCTTTGGTATTTTTAC | Dog | | | | | |
| 941 | cg09566653 | TCCTTGAACTGCTTCATTCGAGCCTCCAGAGGGACAATGGCCCTTTCTCG | Dog | | | | | |
| 942 | cg24354672 | CTGCAATAGGCCGAGCCGGCTGCATTAAGCTTCTTGCAATCAATAAAGCG | Dog | | | | | |
| 943 | cg23618499 | ATTACAGGAAATTATTGTCATTCTCCTGTTAAAATAACACATAATCATCG | Dog | | | | | |
| 944 | cg16021411 | CGGGTAAAAATGGGGCTGTCATCTTGAGCTACAAGTTAGAAAGTTATTAC | Dog | | | | | |
| 945 | cg24477176 | TGGTAGGAGCGCTTGCCTCGTCGCTACAGCTTTTATAGGGCTGTAAAACG | Dog | | | | | |
| 946 | cg21508496 | CGCTTCGGGAAACCAGCCAAGCGCAAAATGTGGAAACTAAAATCCTTTGG | Dog | | | | | |
| 947 | cg03123810 | CGCTGACACCCAGGAAGAAAAATTGGACCCCTTGGGAGATGGACCGATTT | Dog | | | | | |
| 948 | cg23825683 | CTCCTAACAATCCTCCAGGTGTGGTTTCAGAACCGAAGAGCCAAGTTCCG | Dog | | | | | |
| 949 | cg04294426 | CGTGGCAGGGCCGAGGTGAAGTTCTGACTCTGCATTTCTCTAATCCCCAG | Dog | | | | | |
| 950 | cg24276148 | CGAGGGATCTCAGCCCCACAATATTTCACTTTAAAGAGAAATGGAAACAA | Dog | | | | | |
| 951 | cg05170661 | CGGCACTTTCTGATGTAACAATCGAGTGTGTGTTTTCCCAACTGCAGCTT | Dog | | | | | |
| 952 | cg16446343 | CGAGGCCATAATTAATTTGAGATTTATTTTTATTGGAGAACTCGAGTCTC | Dog | | | | | |
| 953 | cg13531810 | CCTTGTTTCAGTCTTTACCACTGGCATCTCCGTTGAGGCTGCCTGAAACG | Dog | | | | | |
| 954 | cg11137703 | CCTGGATGTGGTGCTGCTAATGGGTGCTGCACTGGGCCAGATGGGCATCG | Dog | | | | | |
| 955 | cg26418994 | CGACTCGCCAAAAGTTCTGAAGGCATCGTGTTGATTAATGCAATTTATCT | Dog | | | | | |
| 956 | cg08587914 | CGGGCTTATCTGTAAACTGACTGAATTCACACTGGGATGCTAAGAAAATA | Dog | | | | | |
| 957 | cg04931708 | CGCAGAGTTCTTGGCGCACCAATGACTCGGGGACAATCACTACTTATTTC | | Cat | Mouse | Rat | Human | |
| 958 | cg05317739 | CAGCATTGAAGAGCGATTTCCTTAATGAGATGGAGCGGTTGCACGTCACG | | Cat | Mouse | Rat | Human | |
| 959 | cg14104121 | TGAAGCTGTTGTCTGGAGGCAATGATCCCAAATCTGAAGGCTTTATTCCG | | Cat | Mouse | Rat | Human | |
| 960 | cg26391562 | CGCCAGAGAAAGGGGCTTTTCTTGTTGCTGACGACATGTGTGTGACATGT | | Cat | Mouse | Rat | Human | |
| 961 | cg18513739 | CCGCCTTGGCAGCAGAAGGTGACATCTGGTGACTAATGGCCGCGGCTGCG | | Cat | Mouse | Rat | Human | |
| 962 | cg24352905 | GACCCCTTTACTCCGTGACGTGCAACCGCTCCATCTCATTAAGGAAATCG | | Cat | Mouse | | Human | Universal |
| 963 | cg01061575 | CGCAGGTTGAAGTTCATGAGTTCGCCCAGCCTCAGTGACCTGGGCAAGAG | | Cat | Mouse | | Human | Universal |
| 964 | cg02553441 | CGGAATTCAGAATAGTTATCACATTTAAAGCTGCTAAACCAATGGCAGTG | | Cat | Mouse | | Human | Universal |
| 965 | cg01409964 | GCAGCTTGCAATGCTCGAACAGAAATAAATTTCACTTCCTCAAACTCTCG | | Cat | Mouse | | Human | Universal |
| 966 | cg10491556 | GGTCAGGGTGTAGGGGTACCACCAGGCTGGGGAGCGCTCCAGGTAGTGCG | | Cat | Mouse | | Human | Universal |
| 967 | cg19908562 | CGGCGCTGATGCCATCCTCTTTGAGGTTTTTCTCAATCGCCTTGCTCCGC | | Cat | Mouse | | Human | |
| 968 | cg24860713 | TGGCTTCCTCGTGCTCCAGCGAGTGGAAGTGCAGGTGGTTGGGCAGCGCG | | Cat | Mouse | | Human | |
| 969 | cg12135913 | CGCTAGAAGGGAAACAGTCTCTGCATTCACAGGGCTGGGCTGTCAAGTGC | | Cat | Mouse | | Human | |
| 970 | cg02317025 | AGATGGGCCACTTTCTTCTGGCCACAAAGGGGCCGGAATGGAGCGCTCCG | | Cat | Mouse | | Human | |
| 971 | cg07566172 | GTCCTCAGTGACTTCATGAGCCCCCTGTTTACCTTACATGGTCACACGCG | | Cat | Mouse | | Human | |
| 972 | cg05262155 | GAGTTCGGGGCTCTGCTGCAATGTCTGCGAGGCTGACTTTGAGCGCCTCG | | Cat | Mouse | | Human | |
| 973 | cg09258317 | ATACTCTGGCTTGGGGACTGGAATAAAACACACGCGCTCTGAGGCAGCCG | | Cat | Mouse | | Human | |
| 974 | cg26880735 | TTCTGAATTCACCAAAGAGAGTTTTCTGTTATATTTCAGAAGTACTTACG | | Cat | Mouse | | Human | |
| 975 | cg20275558 | CGCCAACTCATCCTGCATCAAGTGCCCATTGAGTAGCACTGTCACTTTAA | | Cat | Mouse | | Human | |
| 976 | cg15182157 | CGAAGGGCAGTTCGTAAACAGCACTTGTTCTTTTAATAAAAGAATGTTTT | | Cat | | Rat | Human | Universal |
| 977 | cg11728741 | CGGCCAAACAGCTGAAGAAAATCAAAGACATCGAGGCGCAGGCCCTCCAG | | Cat | | Rat | Human | Universal |
| 978 | cg07056567 | GAGCTGGAGCAACTGAGACAGGAGGCCGAGCAGCTCCGGAACCAGATCCG | | Cat | | Rat | Human | Universal |
| 979 | cg08510667 | CGCCGGGATGAGCCGCCCCCTGGACACCAGCCTGCGCCTCAAGACCTTCA | | Cat | | Rat | Human | Universal |
| 980 | cg27208811 | CGAGCAGTATTGCTTATCAGAACACACCAACAGTCTTTTTGTAATATTCG | | Cat | | Rat | Human | Universal |
| 981 | cg24504442 | CTAGGTAAGTGTTGGAGATTTAAACCTACCCTTTGCGCCATCAGTCTGCG | | Cat | | Rat | Human | Universal |
| 982 | cg01245471 | CGGATTTCTATGAAGAAATCGAGGTGAGCTGCACCCCGGACTGCGCCACC | | Cat | | Rat | Human | |
| 983 | cg21801378 | CGGGCTAAACCCCGGTCCCGCCGTACCCATGAAGGACCACGACGCCATCA | | Cat | | Rat | Human | |
| 984 | cg00958552 | TGAACCTGGTATCTGGTGATCCTATCTTGTTTCATCTGTTCAAATTTGCG | | Cat | | Rat | Human | |
| 985 | cg03603326 | GGGTGTGTTTCTTCGGTCATTTTCTTGTTCACCTAGACGCCTGTCCCGCG | | Cat | | Rat | Human | |
| 986 | cg03740978 | CGCAGCACGCGGCACAGCGCCCCCTTGTCCATGGTCTCGAAGTCCGGGCT | | Cat | | Rat | Human | |
| 987 | cg04875128 | CGCCACGTACCCGCAGCAGAACCGCTCGCTGTCGTCGCAGAGCTACAGCC | | Cat | | Rat | Human | |
| 988 | cg13690286 | CCAAACCGGTCTTGCAGGTCCCAGGAAGGTGGCGTCAGCATCTGCAGCCG | | Cat | | Rat | Human | |
| 989 | cg05413840 | CGTCTGGCCGCATCTCAGATGTGTCACCTATGCCGGGAGGGAATAAGGAA | | Cat | | Rat | Human | |
| 990 | cg05542681 | CAATGACGAGGCAGGGGGGCAGGTGCTGCGAGAAATACTTGAAGAGCTCG | | Cat | | Rat | Human | |
| 991 | cg05968022 | ACATTGGCTGGAAAGTGGAGCAGCTCGTCAGGGACAATCAATGGCGATCG | | Cat | | Rat | Human | |
| 992 | cg06332339 | CAGACAGCTGTGGGACGGTGCTCGGAAGCGCCGTGTCACCGTAAACACCG | | Cat | | Rat | Human | |
| 993 | cg08069459 | CCTGGCGGCAATCAATTTGGGTGTCACATGAAATAGGCATAATTATTCCG | | Cat | | Rat | Human | |
| 994 | cg20435403 | CGCTAGCTAGTAGGAGGGCTTTATGGAGCAGAAAAACGACAAAGCGAGAA | | Cat | | Rat | Human | |
| 995 | cg11369802 | CGATGAGCTTCTTGGCATATTTCCTGACAATGTTATCTTCTCCGAAGATG | | Cat | | Rat | Human | |
| 996 | cg12448957 | GCACGATGATGGGGCAGGTGATACTGTAGGTCATGACCACCGTGAAGACG | | Cat | | Rat | Human | |
| 997 | cg12505751 | CGCCTATGACTACGATGAACTTCAGAGCAGAGTGTCCAATCTTGAAGAAA | | Cat | | Rat | Human | |
| 998 | cg12839840 | CGCCATTGATTGTCCCTGACGAGCTGCTCCACTTTCCAGCCAATGTCAGG | | Cat | | Rat | Human | |
| 999 | cg13447705 | AGTGGGGCTGGGCAATGTCTGGAGGTTTCCCTACCTGGCCTTCCAGAACG | | Cat | | Rat | Human | |
| 1000 | cg23449274 | GCGGAGCGTGTTGCCGGCAGTGCTGCTCTGGACTGTACTGAAGGCAGACG | | Cat | | Rat | Human | |
| 1001 | cg15993931 | TTCATGAGCCCCCTGTTTACCTTACATGGTCACACGCGGCCTAATGGACG | | Cat | | Rat | Human | |
| 1002 | cg16455800 | CGAACTGGAAAGCAGACTCCATAACATGCTAGTCAGTGGAGAAATCAAAG | | Cat | | Rat | Human | |
| 1003 | cg17115006 | TCCATGATCAATCCCATCATCTATGCCTTCCGCAACCAGGAGATCCAGCG | | Cat | | Rat | Human | |
| 1004 | cg18200760 | CGTCCTCTTCCGAAATGCAAAAGATCAGTGACTTTGACAGGTAGATGAGG | | Cat | | Rat | Human | |
| 1005 | cg18910772 | CTCATTTTAGACAAACTGCGAGTGGCATTTTGTTTATATGGTTCATTTCG | | Cat | | Rat | Human | |
| 1006 | cg19397128 | ATTACGTCAGTTTCAAGACACCAACACTATTAATATCAAAGGAGCCTTCG | | Cat | | Rat | Human | |
| 1007 | cg21773992 | CGCCGGTGAATGGTCAGTGCTGGAGTTTGAACAGGGCCCTGAACCATCTC | | Cat | | Rat | Human | |
| 1008 | cg24897861 | CGTGGAAAGATTATTCTGACTAACGAGGTTCTGGGCCACTAATTCATTAC | | Cat | | Rat | Human | |
| 1009 | cg24266105 | GCTCTGGAACAGAGCATTGAGTTCATTAGGGACTCTCTGATTTCCATTCG | | Cat | | Rat | Human | |
| 1010 | cg27287578 | ATAGAGCTTTCACTGAGCTTGTGCTATGACCTAAGCCTTCACGCAGAACG | | Cat | | Rat | Human | |
| 1011 | cg25477526 | GGACGAGAGAGACTGCAGCAAGGGTTTCACGTGATCGTGTGTAATGTTCG | | Cat | | Rat | Human | |
| 1012 | cg26390542 | CGCCTGCCACTATACACAAACGTTAAAATAGGAAAACGGAAAACACTGAC | | Cat | | Rat | Human | |
| 1013 | cg05455896 | CGCTTAATAAACATAATGATGACATAAGATGTAATTCTAGATGAATTTTC | | Cat | | Rat | Human | |
| 1014 | cg05129035 | CGCGTGTCTGTTGTCTGAGCAGGCAGCTCTCAGCATCACCCATCCTGCTG | | Cat | | Rat | Human | |
| 1015 | cg05090186 | TTAGAACTTGTAGATTTGAGCTGCCTGAATTGGCCAGACAGCTGTAATCG | | Cat | | Rat | Human | |
| 1016 | cg05675373 | AGGCGGGTTCCCGGTAGGGTGCGCAGGGTGCTGCGGTAGGTCTCATGTCG | | Cat | | | Human | Universal |
| 1017 | cg00310215 | CGCTGGCCCGGTGCCAATCGCCTTTCAAAGAGCCCCTCTATGATTAATCG | | Cat | | | Human | Universal |
| 1018 | cg06461219 | GGTGGGGAGAGCCCCCGGCAGTTGGAGACCAAAAACAATTTGCCCAATCG | | Cat | | | Human | Universal |
| 1019 | cg06997801 | CGGGGGCCAAGTCCAGGGCAGCCCACAGTCAGCCATTCAGGAAAGCCATC | | Cat | | | Human | Universal |
| 1020 | cg17437489 | GCTTTCTTCAAGCAAGTGCGTATTAATTTCTGTCATCCCAAACATCATCG | | Cat | | | Human | Universal |
| 1021 | cg00975350 | GGGCGCCTGCCAGGAACACTCAGCTCATAATAACCTCGCGGAAAACACCG | | Cat | | | Human | Universal |
| 1022 | cg02073955 | CACTTCTGAGCAGGGTGCAGAACAGTAAACTATAATTTAAACAAGAATCG | | Cat | | | Human | Universal |
| 1023 | cg02532525 | CTGTTACTGAGGGCGGCCCGGGCAGTAAGCAGTCTAGAGCCAAGGTGCCG | | Cat | | | Human | Universal |
| 1024 | cg06571003 | CGCGCTCCCATATAATTTATGACTGCCTCTGGTCCTGATGACAGATTATT | | Cat | | | Human | Universal |
| 1025 | cg07493901 | CGGGGCCAGCCTGGAAGATTGTCACTGTAACCTCTTCTGCCTGGTGAGTG | | Cat | | | Human | Universal |
| 1026 | cg08912313 | CGCCTTATTGAACAATTCATGGTTTACTGACCATGTTAATGATGTAATCT | | Cat | | | Human | Universal |
| 1027 | cg14334315 | TAAATAAATTCTGAAGTAATCACGTCTTTGCTCTCCTCCTCACGCACACG | | Cat | | | Human | Universal |
| 1028 | cg18502834 | CGCCGAGAAGCTGCCGGTGACCATGAGCAGTTTGCTAAACCAACTGCCTG | | Cat | | | Human | Universal |
| 1029 | cg19561061 | CGCACAGTATTTGCCGAATCTATGGAAATCTTGGAAATGCTTTGACAGCT | | Cat | | | Human | Universal |
| 1030 | cg21513836 | CGGGTCTGAAAGCACGTGGCTACGTCATGGAAAGCCAGTCTTTTCAATGC | | Cat | | | Human | Universal |
| 1031 | cg22673296 | CTGCCCCAAGATTGATCTGGTCCATAGGATGCCCCAGATCATTGCATTCG | | Cat | | | Human | Universal |
| 1032 | cg26869371 | TGGCAGGATCCATGTCAGTATCCATTTGTGCATTATAGTGTAGTGCTCCG | | Cat | | | Human | Universal |
| 1033 | cg25430489 | CGGAGGCGCAAGTCCTGCCAGGCCTGCCGCTTCATGAAATGCCTCAAAGT | | Cat | | | Human | Universal |
| 1034 | cg19912994 | TGGCCAAGGGCGAGGCGTCGGAGAAGATCATCATCAACGTGGGGGGCACG | | Cat | | | Human | Universal |
| 1035 | cg02322553 | CGTCACTGTGCGTGCCAACATTGCTGCCATCACTGAATCAGACAAGTTCT | | Cat | | | Human | Universal |
| 1036 | cg01053290 | CGAGGGCCTGACACACTAATTACAGTGTGAGCACTCAATCATCAACACCT | | Cat | | | Human | Universal |
| 1037 | cg13058338 | CGCGGGCTGGTTATGCATTTAAATGTTATTTAATTGGATTGCGGAGGAGC | | Cat | | | Human | Universal |
| 1038 | cg06796779 | CGGCTTCCCACCCACGCCACCCAAAGAAGTGTCTCCTGACCCTAGCACCA | | Cat | | | Human | Universal |
| 1039 | cg21084050 | CGCTACACCCGCCTCCGGGACTGGCACCACCAGCGCTCTGCCCACGTGCT | | Cat | | | Human | Universal |
| 1040 | cg22569774 | ACCTTCCACTTTGGTAAGGGTCAGGACCGGACTGTTGCAGGCGCTGAGCG | | Cat | | | Human | |
| 1041 | cg00060304 | CGCATTGAGCCCCTTAGTGCCTTGATTAACAGGCAGATTAACTCTTACTG | | Cat | | | Human | |
| 1042 | cg13692433 | GAGTTGCGAGTGTGCTGAGGCTGGGACTGTCACTCATTCTCCGATCAGCG | | Cat | | | Human | |
| 1043 | cg01079397.2 | TGGCTACGGCTCCTCTTCCGTCTCCTCAGTGCGGGGAACATGTAGAGCCG | | Cat | | | Human | |
| 1044 | cg15273822 | GAATTCTCTACACACCAGTAACGGGATTTCAATTCCGATGGACTCTGCCG | | Cat | | | Human | |
| 1045 | cg25607172 | CAGGTGAAAATCTGGTTCCAGAATCGCAGGTACAAGTGCAAGAGACAGCG | | Cat | | | Human | |
| 1046 | cg15334728 | CGCTGCCTGGACTCAGAGCACAATTGCGTTTCCTGCGGGTTATTTTTGGC | | Cat | | | Human | |
| 1047 | cg20655169 | CTTAGTAGCCCTGTGCCTGACCTTCGGGGTGGAGGTGGGCTTTAAGTTCG | | Cat | | | Human | |
| 1048 | cg14193568 | TGCAGAAGCAGCAGAGCAGGACGATGAGACCCCAGATGAGCCAGAAGCCG | | Cat | | | Human | |
| 1049 | cg08695595 | CGCTCCCTCAGCTGAGGGCTCCGCTCCACAACAAGATTTACTTTAAGACA | | Cat | | | Human | |
| 1050 | cg00130134 | GACATTGAACCCAAATTTGATAGACTGCTGTTTTTCTGGTCTGACCGTCG | | Cat | | | Human | |
| 1051 | cg00190912 | CTACAGGTAATGGTCACTGATGCTGGTGGGAAAATACTCCTGTTGGAGCG | | Cat | | | Human | |
| 1052 | cg08916715 | CGGCACTGCCAGTCAGGTTAATCATCCCTACTTTAATTAGCTGTTCGGCT | | Cat | | | Human | |
| 1053 | cg09829700 | CTCGTTGATGGGCTGGTTGTACAGCCGCAGGATCTCCTCCAGGCTCAGCG | | Cat | | | Human | |
| 1054 | cg01378910 | TGGCTTTTCAGTACATTAAACAAAGTTTCATAAATGTCTCCGCTCTCTCG | | Cat | | | Human | |
| 1055 | cg01499097 | CGGCAGCCTGCCTGAGATCCTCTAGCACTGAAATAATATCATCCAGCACG | | Cat | | | Human | |
| 1056 | cg01935380 | TCCAACTGAGATAATAAAGCAAACAATAACATTTGATCATGATGTCTACG | | Cat | | | Human | |
| 1057 | cg01996115 | GGTAAAACAGACCTGTCTGAGGGTCTAAAGTGTCCATCTCTTCAACCTCG | | Cat | | | Human | |
| 1058 | cg02017534 | AATGTTCAATAATACATTCTCCGCCAGGCTCAATTCATCAGGGAGTTTCG | | Cat | | | Human | |
| 1059 | cg02385429 | GCTGGCGGCGCTGGAGGGATGGTCGGGGGCTGGCTGGCTGCAGGCTGGCG | | Cat | | | Human | |
| 1060 | cg02582218 | GGTACTGTCTTTTGTGACAAAGTTTCCTCTGGTAAGTTACAATTATAACG | | Cat | | | Human | |
| 1061 | cg04084271 | GCAAAATAATGTAAAAATAATGAGCTCCTATTCCCCTTTGATGTGCAGCG | | Cat | | | Human | |
| 1062 | cg04110765 | CGGGGCTATTTTCTGAGAGTCTCCTGACACCATATCTAATTTCCAAAATG | | Cat | | | Human | |
| 1063 | cg04371354 | AGAGCTATTTTAGAAAACCCAAATTGCCAACAGTAATAATCTCTCCGCCG | | Cat | | | Human | |
| 1064 | cg04735310 | TCAACACGGTGAAGTTTTATTGTATTTCCGGTCCCCAAGATTTATACCCG | | Cat | | | Human | |
| 1065 | cg04895159 | AGATACAGGTATCAAGGCCAAATGTCAGTTCCATTACACAAAGCCCCGCG | | Cat | | | Human | |
| 1066 | cg04927173 | CGCCTGCCCGCTACAGCTGTGGAAGGTCACTCATTGGGGAAATATGTTTC | | Cat | | | Human | |
| 1067 | cg04927884 | TTTGTCTGCAGTGAAAGGCTTTTGTTATTGCTTTTCCCCTAAGGGTTTCG | | Cat | | | Human | |
| 1068 | cg04958428 | CGGGAGCTCGTCCATGGTGATGCCCTGAGATTTGAGGTGCTTCTTGATGC | | Cat | | | Human | |
| 1069 | cg04991486 | CGGCAGAGCCCTTCTGGACAGCTCCCGCTCACCCAAACAGAAGACGTCGG | | Cat | | | Human | |
| 1070 | cg05311559 | CGCTAGGAGGCAGAACAAGATCAAGAAAGCTCAGCGAACTTGAACCTGTA | | Cat | | | Human | |
| 1071 | cg05362516 | GGTACAAGTAGCCCTGCGGATAGGACATGGCCACACACGGGCATGGGGCG | | Cat | | | Human | |
| 1072 | cg05576116 | CGCTTGACATCAAAGTCGAGGACACGAATGTAGTCTACCAGGACAGCAAA | | Cat | | | Human | |
| 1073 | cg06056217 | CGGAGCTTTTAAGGGTTTCTAATCCTGGAAGGCTGTCTGACATCACCCCG | | Cat | | | Human | |
| 1074 | cg06071123 | CGTAACCATGTAGGCCCTGCAAAGGCTACCAGTCCATCTCTCCGTCTTCG | | Cat | | | Human | |
| 1075 | cg06447962 | GTTGACAAGTTTTCTAACAGACTTTCTGAAATAATGCACATATATTCACG | | Cat | | | Human | |
| 1076 | cg06504202 | CGCCCCGATATTAATTAACGCATTAATAAGAGGGCGCCATTAGCCATGTG | | Cat | | | Human | |
| 1077 | cg06673387 | CGCCCACTGCAGACAGCTCCATCTTGCTCAGCGGCACCCACAGCCCATAA | | Cat | | | Human | |
| 1078 | cg07131451 | AGCCACTGAACCACAAGCAGCTTCGCGTTAACTGGAGTGCCTGGGAGTCG | | Cat | | | Human | |
| 1079 | cg07439538 | AATGACAATTAGCACTAATCTGGCACTTTATAAATTGTGATGTAGCCTCG | | Cat | | | Human | |
| 1080 | cg08253970 | AGGTACCTAGTTTCTGCCCCAGGTAGGTGAGGCTGTGATAGACCTTCTCG | | Cat | | | Human | |
| 1081 | cg17534919 | TTCGGGGCCGTAGCACTGTCTGAGAGGTTTACATTTCTCACAGTGAACCG | | Cat | | | Human | |
| 1082 | cg08357395 | CGCCCTGCTGCCAGTCCCACGTGCAGACGCACCTGCAGCAGCCCTCCACC | | Cat | | | Human | |
| 1083 | cg18434381 | CGCTCTCGCAGATCTACGACTGGATGGTCCGTTACGTGCCCTACTTCAAG | | Cat | | | Human | |
| 1084 | cg09535856 | CGCAGCTGATGCTGTTGACGGTTCTCTGACCCAGCAGTTGGAGGCCCTGG | | Cat | | | Human | |
| 1085 | cg19264807 | CGGTTAACAGTTTGAGGTCCAGGGTGCAGCTTTGGATCAGTTCATCTAAT | | Cat | | | Human | |
| 1086 | cg09966078 | CCAAGCAGTTTGCGGTGTGGCAGGCGGCCAGAAAAGCGTTTCTTTAAACG | | Cat | | | Human | |
| 1087 | cg10548614 | CGCTTCTTTGCTAAGCTGTTATTTTAACCATAAAAGGTAAACAGAAGGCG | | Cat | | | Human | |
| 1088 | cg10642116 | CGGACACAGACTTCCAGTCTTGCGAGGACAGCCTCATAGAGAATGAGATT | | Cat | | | Human | |
| 1089 | cg10717922 | CGGTCTCTGCTCATAGCTGAGAAGCCCGAAGGCGGCCATGATCTCTCATG | | Cat | | | Human | |
| 1090 | cg10751692 | ACTGACAAAAAATTTAAAAACCAATGTCCGGTTTCAACCAGTCAAAACCG | | Cat | | | Human | |
| 1091 | cg10752869 | CGGCCCGTCAGCAGCCCACATGTAACCGAACTGTCGTGTTTCATGGCTTT | | Cat | | | Human | |
| 1092 | cg10868173 | TCCAAGGCAAACATGCCAACTCGGAAGGCCAGGTTGTGGTGCTCTGGACG | | Cat | | | Human | |
| 1093 | cg10868866 | CGCTATGCAAATGACAGGACAAATCATGTGAAAAAGTCAGGATAAACTGC | | Cat | | | Human | |
| 1094 | cg10880576 | GCTTTTGCTATTCATAAATTTTAGGGCCTTAGATATTAGATACACTTACG | | Cat | | | Human | |
| 1095 | cg11370011 | TTCTTTTGGTGTTCAGAGTCAATATAATTTTCTAGCACCATCTGAAATCG | | Cat | | | Human | |
| 1096 | cg11527171 | CTCTGCTCTGTCTCCCCCTTTTGTAGGTGACTTTTTCACAGACTGCTACG | | Cat | | | Human | |
| 1097 | cg12001730 | CCTTCTTGTTTGCATCACCTCCAAGGAATTCATAATATCAAAGCTTAACG | | Cat | | | Human | |
| 1098 | cg12808529 | CGGCTCTCCAGGGGAAAAGCTGCAGTTCTGCTCTTGCAACACAAGGAGCA | | Cat | | | Human | |
| 1099 | cg21989707 | ACTTGGATGACATTTTGATTTCATCATTAGCATCCGGCGCCGGATTGACG | | Cat | | | Human | |
| 1100 | cg12892262 | TAACACATTTTCTGTGCTAAAAATTAGATTCTGATATATAATTATCAACG | | Cat | | | Human | |
| 1101 | cg22822366 | CGGGGGTGACAAGCCTTCCAGCCGCTTCCATGATTTTGTTGACCTTTGCT | | Cat | | | Human | |
| 1102 | cg14007606 | GCCACTGTAGGGGCACTTGTGCCTCTTTTCGGAGGCGTGTTTCCCCTTCG | | Cat | | | Human | |
| 1103 | cg14670966 | CGGCTGACTTGACAATGGGCCCGGGAAATCCCAAGTTAGTACTTAGTTTA | | Cat | | | Human | |
| 1104 | cg14689355.1 | ACAACAACAAAAGCGGGTTTAAATCACTGTCAAAATCACTGTCAGCTCCG | | Cat | | | Human | |
| 1105 | cg15791636 | CGCCCGGACCACCCCCCACGGGGTGCTCTCACTGCGCAGCGAGTCCCTCC | | Cat | | | Human | |
| 1106 | cg16111936 | CTGATTATTTTATTTGCAGCCATAATTATATTTCTTTCGGCTAAATCACG | | Cat | | | Human | |
| 1107 | cg16531937 | TCTTCTTGTCTTACGCTGCTTGCTCTTCTCTCCTTCTAAAGATGGTTACG | | Cat | | | Human | |
| 1108 | cg16947830 | CGTAAAAGACACATAATTTCAAGCATTTAATAAGGTAGATTTATTCTGGG | | Cat | | | Human | |
| 1109 | cg17179099 | CGGCCGTGGAACTAGAGTGGATCCCAGAGACTCTCTATAACACCGCCATC | | Cat | | | Human | |
| 1110 | cg17415555 | AGCAGAAATCCGCACTCAGGGTGTTGAGATACAAGGCGAGCCCCAGAGCG | | Cat | | | Human | |
| 1111 | cg25751973 | CGGAATAAATTCGGCGGGACTTTTAACAAACATGGAGGCAGAAAGTAAGT | | Cat | | | Human | |
| 1112 | cg17439607 | CGGCTAATTCTGTAGGAAAAGCACTAATTAGAAAAGCAATAATAATCGGT | | Cat | | | Human | |
| 1113 | cg17552603 | TTCTGCTAACTTTCAGACTTCATTGCTGACAACAGGCCTCTTGGCTTTCG | | Cat | | | Human | |
| 1114 | cg17659328 | CGACCGCGGCAGGACTCGAACCTGCAATCTTCTGATCCGAAGTCAGACGC | | Cat | | | Human | |
| 1115 | cg26073458 | CGCGCCGCCGCCCATGTCATTCCACTTCAAGTGACTTCATGTGATGTCAG | | Cat | | | Human | |
| 1116 | cg18369277 | CGCCGGTGCTAGCTGACCCACAGGAAACGAGCGCTGCTGACCTAGTTTGG | | Cat | | | Human | |
| 1117 | cg18809289 | GAAGTCGTTGTAGAAGGGCTTGTCCAGCAGGTGCTTCTCGCTGCAGCCCG | | Cat | | | Human | |
| 1118 | cg18897345 | CGCGGGGAGCATGCATCAAGGGTCCGTGGCAGTGAGAAGTCCCCACACAC | | Cat | | | Human | |
| 1119 | cg19631884 | CGCGGCACAGCGCCCCCTTGTCCATGGTCTCGAAGTCCGGGCTCTGCGCC | | Cat | | | Human | |
| 1120 | cg19759021 | CGGACGAAGGAATTGTTGGAAAATTTTCTCGGAGGTTCGTATATAAATGT | | Cat | | | Human | |
| 1121 | cg20096563 | CCCGCTTCCTGCTTTCTAATGTTCCATTGTGAGGAGCTTCCATTGTGACG | | Cat | | | Human | |
| 1122 | cg20123809 | CTATGTGACTTCAACCCCAAGAGCAGCAAGCAGTGCAAAGATGTGTCCCG | | Cat | | | Human | |
| 1123 | cg23160683 | CAACTCTCATTCATTTCGCCGGTTAACATGAGAGATCATGGCCGCCTTCG | | Cat | | | Human | |
| 1124 | cg20670041 | GAACAGGAGCAAGATGATTCTACTGTAGCCTGCCGTTTCTTTCACTTCCG | | Cat | | | Human | |
| 1125 | cg20718259 | GACAGGGTCACCCTTCACGCAGTCTTCCTTCTTACCATCTTTATGGTTCG | | Cat | | | Human | |
| 1126 | cg20751146 | GCTTGAAGTATGGCATGTTGCAAAGATGGTTTCTGCCAAGAAGGTACCCG | | Cat | | | Human | |
| 1127 | cg21334666 | GTGCAAACAGGCTTGCAGAACGCTGGCTGTGCAGCACGCCTCATACATCG | | Cat | | | Human | |
| 1128 | cg21458150 | AAGCAGACTCCTGGCTGTGACGCACTTCTGGCTGTCAGCCAGGAAGATCG | | Cat | | | Human | |
| 1129 | cg21475953 | CGGCGAGAGCAGAAACCACCTAAGAAGCCCAAATCTCCCAAAGCTCCAGG | | Cat | | | Human | |
| 1130 | cg21727711 | CGCCCGAAGGCCTCGATGATAACAGCATTGATTCCAATGTACATCTAATT | | Cat | | | Human | |
| 1131 | cg21998638 | CGCCCGAGGAGCTAACCATTTATGTCACACTGTGACAATTATTCTGCATA | | Cat | | | Human | |
| 1132 | cg22515103 | CGGCTGATGTATGGCATGTGGGGCTGGAAAGCTGCCATCATAGCCCAGTA | | Cat | | | Human | |
| 1133 | cg22793142 | AGCCACACCTCAGTGTTGCGGCAAAATAATTCTTGGCTCCCCTGGAAACG | | Cat | | | Human | |
| 1134 | cg24044043 | CGGCCAGAGGTGGTGGAGTGCAAAAAGCTTCCTACTTGCGACCGAAAAAA | | Cat | | | Human | |
| 1135 | cg23184246 | TGCTGGGGGGCTGGTTTAAGGGCTGGAACGAGTGCGAGCAGACTGTTGCG | | Cat | | | Human | |
| 1136 | cg23263602 | GAATGAAGGCTAATTACCTCAAGATCAGAACAAAATAACTCCTCATTTCG | | Cat | | | Human | |
| 1137 | cg25999777 | CTATCGCACACTGGAGCCAGTGCGTCCTCCAGTGGTACCAAATGATTACG | | Cat | | | Human | |
| 1138 | cg23582869 | CGAGGTTTTTTGTGACCTGTCCCTGCCCATCCCCAAGGTGGGATTCCAGA | | Cat | | | Human | |
| 1139 | cg26278617 | TATGACATTCCTAAAATATCTTTATTTAATAATGAAAACTTCATTATCCG | | Cat | | | Human | |
| 1140 | cg24028874 | CGTGCCAACAGTCGGCAAATTCACTGACAGTTCAAATGCGACATTTTTAG | | Cat | | | Human | |
| 1141 | cg24921129 | TCCTGGGATGTGACAGGTATTAATAACCCTATTAGCTGCAATCCCATCCG | | Cat | | | Human | |
| 1142 | cg24105939 | CGCCTAGAGACTTAAAGCTTTAATATGGATTAAAATAAGATAATCAATCA | | Cat | | | Human | |
| 1143 | cg25519108 | CGGCGCCGGATGCTAATGATGAAATCAAAATGTCATCCAAGTTAAATGCG | | Cat | | | Human | |
| 1144 | cg27286591 | AATGATAATACACAATTTTAGCACTGACGCTTGGCTGATTTAGGTGTTCG | | Cat | | | Human | |
| 1145 | cg25643003 | CCACACAGTACAGTAACTTATATACTTACCTGGAAGAACCCGCTTTGCCG | | Cat | | | Human | |
| 1146 | cg25250067 | TGTCTGAAGTTGAGAAAGCCAAGATCCGGGGATCGTACCTCACTGTCACG | | Cat | | | Human | |
| 1147 | cg25356878 | GCCTGCACTCACACACAGACAGAGGGGCATGATTAAAAGGCGAGAGCGCG | | Cat | | | Human | |
| 1148 | cg25492254 | TTGAGGTGCTTCTTGATGCAGGCCAGCCGCTGCACGTTGGGGCCCCAGCG | | Cat | | | Human | |
| 1149 | cg25560333 | CGGCCCTCGACCATCATGTCCGGGAGGAAATCCAGCTTGAAGGCAGAAGT | | Cat | | | Human | |
| 1150 | cg26284526 | CGTGGCGGCCGAGCTGTCTTGTCCAATTCACTGAAGCCAGGCCTCTAATC | | Cat | | | Human | |
| 1151 | cg26072973 | GAGGCAGCCATTTAACTATTCAGAGGAAACAGCTTCCTGGGGCACCTCCG | | Cat | | | Human | |
| 1152 | cg27313020 | GATCCCCACTGCTTAAGAGACGTCCAAAAATTCCTGGTGGAATGTTTCCG | | Cat | | | Human | |
| 1153 | cg26841850 | CGTGGAAGGTGAACGTACCCCACACAGGAGAAGTTTGATGTTGACAAACT | | Cat | | | Human | |
| 1154 | cg27391649 | CGGCTTTTCAAAGGCTCCCAAATTCTAAAAGACAATGACCCAACCCCCCG | | Cat | | | Human | |
| 1155 | cg05320568 | CAATTATGATTTCCATCTAAGCAACATATGCTGTTTGCTGGCCTCTTTCG | | Cat | | | Human | |
| 1156 | cg08578734 | AAGGAATATGCAGCACATTTTTGCCTTCTTCTGCACCGGTTTCCTAGGCG | | Cat | | | Human | |
| 1157 | cg06167345 | CGGCCACTTCGGCTGTGTCAATGCCATTGAATTCTCCAACAATGGAGGCC | | Cat | | | Human | |
| 1158 | cg17777878 | CGCCAAAAATAACCCGCAGGAAACGCAATTGTGCTCTGAGTCCAGGCAGC | | Cat | | | Human | |
| 1159 | cg17289116 | TGCATGTCCAAAGGCCTTCAATTCCACCTGCAAGTGATACTGAGAAACCG | | Cat | | | Human | |
| 1160 | cg09067976 | CGGCCCCTCAGGAGGCTGATTAGGCCACAAAGAGCCCCCATTATCCCGAG | | Cat | | | Human | |
| 1161 | cg13884249 | CGAGCGGAGCAAGGCGATTGAGAAAAACCTCAAAGAGGATGGCATCAGCG | | Cat | | | Human | |
| 1162 | cg10899907 | CGGGAAGAGAAGATCATCGAGCATTTCAAACGGTGAGTGACACGAGGCCC | | Cat | | | Human | |
| 1163 | cg06559544 | TACTGGATCTCCTCTGGGCAATGAAGCTGCCTCCTTTTTCTCCTCTCTCG | | Cat | | | Human | |
| 1164 | cg02982690 | CGTTAACCTGATTGGGTAGAAAGCGCTGTCCCAACAGGCGAGTCTTCTTC | | Cat | | | Human | |
| 1165 | cg17562187 | CGCGGGCTTGCCCTCCAGCCGGCCTTATGGCATTAAACCTGAACCGCTGT | | Cat | | | Human | |
| 1166 | cg03215611 | CGCAGGTCACTTCCTGTAGAAATATGGACTAACTTAAACCTCGTGAGTAC | | Cat | | | Human | |
| 1167 | cg20730297 | CTGTAGGTAAACACATTTTCTCCCTATTTAAGGCTGAAGCACTCAGCACG | | Cat | | | Human | |
| 1168 | cg04604143 | CGGGCTGCTGCACCGTCAGGATCTGAGACTGCTTCTCAGGGCTCACTCAG | | Cat | | | Human | |
| 1169 | cg19245820 | AGAGGGGCATGACCACTTCGGGCAAGCCTTTAAATGTGAGTCAGCTTTCG | | Cat | | | Human | |
| 1170 | cg18232211 | TTGATGGCCATGTGCTCCTGGATGTTGATGGTCATGCGATCGCCCCTGCG | | Cat | | | Human | |
| 1171 | cg00267231 | CCTTTGGGTTCAAGCTGCCTCTGAGAAGATGGCAATAAAACTCTAAATCG | | Cat | | | Human | |
| 1172 | cg11999944 | TTTCGCCCAAATCAATGTGGTTTCTTTGGAACATTTTCAGCAAAGGAACG | | Cat | | | Human | |
| 1173 | cg16032864 | CTCCAGGATAGCCAGGCTTTAATTTGTAATCTTAATTTTCATATAAATCG | | Cat | | | Human | |
| 1174 | cg09277592 | CGGCTCAGCTGTTCCACCCGCTTGCGCAGGCGGTCATTGTCACTGGTCAG | | Cat | | | Human | |
| 1175 | cg01608469 | GGAAGGCAGCACAGTCGGGGCCCCCATTGCCTGCAAAACTGGGGTCCACG | | Cat | | | Human | |
| 1176 | cg21530385 | CTAATCCCAACATGCCTGTTGTTTTGACATCTGGAACAGGGTCGCAAGCG | | Cat | | | Human | |
| 1177 | cg06956589 | AGGCTGCCCAGCTGCTGCAATCTGGCATGCATCATTCCTGTTCTGTTACG | | Cat | | | Human | |
| 1178 | cg01279020 | ATTATTACCCCTCTGTCAAGAATTAGACACAACAATCAAAGTAATCAACG | | Cat | | | Human | |
| 1179 | cg17318899 | TTTCTATTCAAATCCAGGTAGCGAGATATATGAATGGACTTTTCGAATCG | | Cat | | | Human | |
| 1180 | cg10425556 | CGGCACTTCCCCACCGCAGGCTTTGCTGAGCAGTTTTAGTATCAGGAGCT | | Cat | | | Human | |
| 1181 | cg13341299 | CGCATCTAGTCAGACGTAAATAATGACAGACGGAAACTATCATGAGGTCT | | Cat | | | Human | |
| 1182 | cg24918943 | CGCTTGAGTTTGACATCCAGGCACGGCCGCTAAATTGAGGCTCACAAAGC | | Cat | | | Human | |
| 1183 | cg21065165 | CGAGACAAATATGAGAAGAAGAAATACATGGACCGAAGTCTGGACATCAA | | Cat | | | Human | |
| 1184 | cg07903650 | GGTGGGGGCTGGGGCTGGCCAGCAGCTCCTGCTCATGGCCCGGGCCCCCG | | Cat | | | Human | |
| 1185 | cg23939166 | AGCCCATGATGTAATGGTGTATGTTAATCAGTAGCATGTGGGGAGCTCCG | | Cat | | | Human | |
| 1186 | cg22253255 | GGGGGATTTCGGGGGTTGCCCGTGACGTGGCTACTTGCGCAGCGGAAGCG | | Cat | | | Human | |
| 1187 | cg21315747 | CGCTATTTTGCTCATTTTAGAATATTGTGGGTAATGCTAGGCCTAAAGAA | | Cat | | | Human | |
| 1188 | cg07195315 | CGTGTCCTTTGTGATCCACTGTCAACTAGGCAAGGAGATCAAACACATTT | | Cat | | | Human | |
| 1189 | cg07480114 | CTACCTCCATGCTAGTATTAGGGTCAAGATCATCACACTCTGATTCCTCG | | Cat | | | Human | |
| 1190 | cg07514567 | CATTTCTGTGTGTCTGTGCCTCTTCAGTATGCAGAACGTGGTGCCCATCG | | Cat | | | Human | |
| 1191 | cg07157571 | TTAGAGGCTTTGGTTCTGCAAACTTGATGCTCGGCACTTGAACTGTCACG | | Cat | | | Human | |
| 1192 | cg03811583 | GCATGCCTAACATGATTCTTTCAGTCATTTATTATGCAGCTGCTACAACG | | Cat | | | Human | |
| 1193 | cg16089221 | TATTTGCCCTTTTCTGAACTCTACAATTTCCCTCTCTTGTAGCTGGTTCG | | Cat | | | Human | |
| 1194 | cg19629292 | TGTTTGCCATCAAAATGTGACAGAAGAGACACGCTGCATGGCTCGGAACG | | Cat | | | Human | |
| 1195 | cg22407807 | CGATCCCATAAATCCAAGAAGATAAAGTGCATTTTTATTAGTTGTGTTGG | | Cat | | | Human | |
| 1196 | cg16160648 | AGACAGGCGATTCCGATTGACTTCCTAATTACTGCTGCTGGGCTGCCTCG | | Cat | | | Human | |
| 1197 | cg25430089 | CGGTGCTGTAACAATACTCGATGATGTTTGGGATGACAGAAATTAATACG | | Cat | | | | Universal |
| 1198 | cg06392591 | CGGGCCCTGCAGTGTTGAGCCTAATGAATTCCGCTGTGGCTGCTCTGCTC | | Cat | | | | Universal |
| 1199 | cg05575054 | CGTCTTCTTCAACTGGCTGGGCTACGCCAACTCGGCCTTCAACCCCATCA | | Cat | | | | Universal |
| 1200 | cg19217984 | TGCTGCTGTAGGTGACCTTGAGCTCGTGCAGGTCTTTGTAATCCTCTACG | | Cat | | | | |
| 1201 | cg17679560 | TCTTTTTTATAAGCCTCTTCAAGCCCATTTTGCTTCGAAACAGGAAGTCG | | Cat | | | | |
| 1202 | cg24743148 | AAAACTATTACATTAATTAGTCAAATCCCACAAACCGTTAATGGTGCACG | | Cat | | | | |
| 1203 | cg21274598 | CTGGGGTAGGCCGACGTGGTGCCGTTGTAACTCAAAGTGCTGCTGGCGCG | | Cat | | | | |
| 1204 | cg18760617 | CGCGACATGCTGGCTCAAACATCAGCTGGGGCAGAATAAAAAATTACTAA | | Cat | | | | |
| 1205 | cg23559331 | GATGGTGTCCAGGAAGGTGTTTTGCGGGGCCAGCAACCCCTTCATGACCG | | Cat | | | | |
| 1206 | cg07705206 | CGGGTTTTGGTGATGACAAATGACTACTATTATACAGACATCAAGGGTAC | | Cat | | | | |
| 1207 | cg10141261 | CGAGAACAGCAAGCAAGTTCATCTGCTTACTGTCCACACGAAACAGAATT | | Cat | | | | |
| 1208 | cg12220591 | CGGACTGTAAAGTCACAGTTGACTGCTTTAATGTGGAACAGCTGGGAGGG | | Cat | | | | |
| 1209 | cg03411242 | GCCTTGGTAAAAAACACCTTCAAAGTCAAGCCATTGTCTCCAAAAAATCG | | Cat | | | | |
| 1210 | cg04947170 | CGGCAGGCCCGTCGCAGATGGCTGGCCACTAAGCTAATGGGGCAGCAGCC | | Cat | | | | |
| 1211 | cg12904782 | TTAAAGCAACCTTTATTTTATGGCAAATGTTGCAGTAATTGCCTTTTACG | | Cat | | | | |
| 1212 | cg14711273 | CGTGCAGTATAAAAGAATGTTTTTTCAAGTCAGTGAACTTAAGCTATTTT | | Cat | | | | |
| 1213 | cg15555400 | CGCCTGCAGTGGGTATTAAGCACTTAGGTTGGCAATGTAATGACACACTG | | Cat | | | | |
| 1214 | cg16313026 | TTCACTCTGGATTTTTGTTCTTATTTTTAACAGAGCCCCCTCGAGTGACG | | Cat | | | | |
| 1215 | cg16746452 | CGGACACACAGCACCAGACGGTGCAAGGGAAGTTAAGAAAAGACAAATTA | | Cat | | | | |
| 1216 | cg18299578 | AGGCGCACACTAGGGCTGTAAAAAAATTTTTGGTTTAACCTTTCCTACCG | | Cat | | | | |
| 1217 | cg23284252 | CGAAGCAAAATGGGCTTGAAGAGGCTTATAAAAAAGACTCAAAAGGTTTC | | Cat | | | | |
| 1218 | cg17927488 | CGCAGCGCAGGAAGCAAAAGCAGAAACAGACCATGCATCAGATGGCTGCC | | Cat | | | | |
| 1219 | cg18633258 | CGGCTTATCTCCACTAAAAGGGGAATTAGTAGTAAGAAATAATTTCAATC | | Cat | | | | |
| 1220 | cg22386201 | CGGCAGTGTCTGGAGGCTGTTTGGAGTTTTATGGGCTGTACAGTACACTG | | Cat | | | | |
| 1221 | cg26698347 | ATTACAGCGGATCACAGAAATGTTCCAGTCTGTGAGTCGGAATGCAGCCG | | Cat | | | | |
| 1222 | cg21510166 | TGGGCTGTGCCTGGCCTAAATTTTTCCTTTTACCATCTCTGCCTTATCCG | | | Mouse | Rat | Human | Universal |
| 1223 | cg24866418 | CGGCCGCCTTCTTCGTGCTGCTCTCCATGGTGCTGATCCTCGGCTGCATC | | | Mouse | Rat | Human | Universal |
| 1224 | cg05474883 | CGAGATGCTCACGCTCTCGAATGCTGCCGTTTGGTATGGTCTCTTCCAAC | | | Mouse | Rat | Human | Universal |
| 1225 | cg08402704 | CAAAAGGATATCACAGCTCATTTTGGTGGAAGGGTTTCCACGTCGCTTCG | | | Mouse | Rat | Human | Universal |
| 1226 | cg03957108 | TTAAGGAAACAGTGTGCCCTCCATCATATTCTGTTACCGTATTTTATTCG | | | Mouse | Rat | Human | Universal |
| 1227 | cg23687194 | CGGTGGCGCCAGTTAGTCTGCAGCGAGAAGGTTCACACACCCCCTCTATT | | | Mouse | Rat | Human | Universal |
| 1228 | cg12421693 | CAAACTGTCAATACCTTGAATGCTGCAGAATTTGAACAAATAGCCGTCCG | | | Mouse | Rat | Human | Universal |
| 1229 | cg09661809 | GTGCTGGCACTCATCGGCCTCATCTTCCTCATGGTGCTCTACCTAAACCG | | | Mouse | Rat | Human | Universal |
| 1230 | cg14237002 | CGGCCTTTGTTCCTGGAAACTAGGATTCCATGGCATATGGGGCACAGCAT | | | Mouse | Rat | Human | Universal |
| 1231 | cg15330117 | CTTAAGTTGCGTCGCGCCACAGCTGTCTGCGAACACTGAGCTGCCTGGCG | | | Mouse | Rat | Human | Universal |
| 1232 | cg01975510 | CGGGAAAAGGAGAACAATCCCAGCGGCAAAAAGGAGCTGTCTGAAGTTGA | | | Mouse | Rat | Human | Universal |
| 1233 | cg02040024 | CTTCCAGCCAGCCCCCGGCAACAAGACCGTGACCTACTTGGGAAAGTTCG | | | Mouse | Rat | Human | Universal |
| 1234 | cg20726505 | CATAGTTGGTGTGGTACAGCTTGGCAGCCTCCTGAGCCGGGAGCATCGCG | | | Mouse | Rat | Human | Universal |
| 1235 | cg27430422 | TACCTTGATCCTGTCATAGGACCTCTTCCATCCTTGTCATATCCCCCACG | | | Mouse | Rat | Human | Universal |
| 1236 | cg16376499 | CGTCCTAATTATTTCAGTTTGGGATGCCAGAGCTGTTTCCTGGATAGACC | | | Mouse | Rat | Human | Universal |
| 1237 | cg18577444 | ATCACAGGATAATTGCAGAACGCCTGCATAAGTAATTTCTTATGAAATCG | | | Mouse | Rat | Human | Universal |
| 1238 | cg01851187 | CGGCCTGCAGCCTGTGACAGAAATTAAAGGAAAGACCAGTGACCTCTTTT | | | Mouse | Rat | Human | |
| 1239 | cg13171587 | CGGCCATCGGGGGCCAGGGACAGGGACATCACATCCCCACTGTGTCCAGC | | | Mouse | Rat | Human | |
| 1240 | cg25966893 | ACTTCACAAATAGAGGAGCTCCTAAATGTGCCCAACAGCAAGGAAAATCG | | | Mouse | Rat | Human | |
| 1241 | cg13739934 | TGTGTCGCCTGCAGCTGCAGAGCAACCTCTTCGCCAGCCTGGACGAGACG | | | Mouse | Rat | Human | |
| 1242 | cg20665157.2 | TGTCAATAGAAATTGACAAACCTCATCTCCTAAATAGTGCAGCTGAGCCG | | | Mouse | Rat | Human | |
| 1243 | cg17624348 | GCTGTCTAATATGTTGAATAGTCTTTCATCTTGTCAAACACTTCCATGCG | | | Mouse | Rat | Human | |
| 1244 | cg17475635 | CTTCAGACATGTCAGCCTAGTTATTTGTTTTACATGCTGGGTGAGTTACG | | | Mouse | Rat | Human | |
| 1245 | cg16811337 | CGCACCACTTTCTTTGGTCCAGATTCCTGCATGGAAGAAATACCCTGTCG | | | Mouse | Rat | Human | |
| 1246 | cg02622074 | CGCGCTGGGCAGCGTTCCTGGAGCCTCCTAATAGCAGATATTCATGACTA | | | Mouse | Rat | Human | |
| 1247 | cg19843353 | CGCCCCAACCTGCAGCTGGCCAATATGGTCCAGGTGATTCGGCAGATGCA | | | Mouse | Rat | Human | |
| 1248 | cg07440346 | TGGGCTTTGAAATCCGCACCATGGGGGGGGCCGGGGGCAGTGGCCCCACG | | | Mouse | Rat | Human | |
| 1249 | cg08401965 | CGAGACAGAATGTGCTAACATCGGGATAAATTAGTGAAAGGGAAGAAAGA | | | Mouse | Rat | Human | |
| 1250 | cg13656158 | AGGCAGCTGATGGCCTTGAGCTCGAAGACAGGCCACTTGCTGCCCAGGCG | | | Mouse | Rat | Human | |
| 1251 | cg11939159 | CGCGAGGGCAAGCCCTTCAAAGCCAAATACAAACTGGTTAACCACATCCG | | | Mouse | Rat | Human | |
| 1252 | cg11115159 | CATGGTACCAGCATTTGGAATGTTCAGTAAGCCGCAGGCCCAGCCCCTCG | | | Mouse | Rat | Human | |
| 1253 | cg05193512 | AGGACTTCTGACTGTAATCCTAGCACGTCACTTTGTTGAAGGCAGACACG | | | Mouse | Rat | Human | |
| 1254 | cg22470076 | ATTACGCTCTCAGTTTGCTAGGTTGCCCCTTAGGTCCTAATCATGCAGCG | | | Mouse | Rat | Human | |
| 1255 | cg10103348 | CGACCCCGGAGACCCCAAGGCGTTTACTGAGATTAACAGGCTCTTGCCTT | | | Mouse | Rat | Human | |
| 1256 | cg01739251 | TGCCAAATTAAAATGAATCATTTGGCCCATAATGGCCGAGGCGCTTATCG | | | Mouse | Rat | Human | |
| 1257 | cg06000231 | CGGTGTCCAATAACTACATTGTGGGGAATAAGCCCCCAAAGGAATGTGGG | | | Mouse | Rat | Human | |
| 1258 | cg06479604 | TGGTACCACCTTCCTTTCTAAAATAAAATCTCTCTGGCATGAAGTCACCG | | | Mouse | Rat | Human | |
| 1259 | cg14472440 | GCCTTGGCAGCAGAAGGTGACATCTGGTGACTAATGGCCGCGGCTGCGCG | | | Mouse | Rat | Human | |
| 1260 | cg15651233 | GTAAGTAAACATACCAAAACCATATTTGCCTTGTTCAAGGTCCCAAACCG | | | Mouse | Rat | Human | |
| 1261 | cg10238356 | TAGCTCAAGACTGCAGTGCAGATGACGACAACTTCCTTGTGCCCATAGCG | | | Mouse | Rat | Human | |
| 1262 | cg11332125 | CGCCGTTCTCTGTTAGGAGGGTAATTTAGAGCAATTACACCGATTATTAT | | | Mouse | Rat | Human | |
| 1263 | cg12114804 | CGGAAGCGTTACAGGAAGACAGGTCTCAACTTAGGGATCAGATCACGTTA | | | Mouse | Rat | Human | |
| 1264 | cg07843568 | CGCCCCTCTCTGGGCTCTGGGGTCCCTGTCGGTGCCACGGACGCTTAAAT | | | Mouse | Rat | Human | |
| 1265 | cg27070699 | CGCTGCCTAGTGGAAATAATATAATACGTCATTAATATGGCGCCAAAAGA | | | Mouse | Rat | Human | |
| 1266 | cg19282646 | CGTGGAAATGATTTTGTGTTATCAGGCTCAGGGGATGACAGCATACAAGA | | | Mouse | Rat | Human | |
| 1267 | cg17201740 | CGCGGGGGCCAGCGCTGCGGCTGGATTCCCATCCAGTACCCCATCATTTC | | | Mouse | Rat | Human | |
| 1268 | cg13824077 | CGGGGTTAGCAATTTCACGGGTTATATATTTTAGAGAACCTCATTAAGTG | | | Mouse | Rat | Human | |
| 1269 | cg23507236 | GGTACCCAGCTAGCTGATGTGTCCCTATGCCGGTTACCTAGGAGACAACG | | | Mouse | Rat | Human | |
| 1270 | cg20842326 | CCGGTCTTGACTGGAAAAGCTGGTCATTAATTAGCCTCCTTTTGCCTTCG | | | Mouse | Rat | Human | |
| 1271 | cg06060272 | CGGCTCGGCATTTTGGAACAGAGAAGCCCCCGCCGTATATTTGCTAAAAA | | | Mouse | Rat | Human | |
| 1272 | cg13505775 | AGAACGTCGAGATGGAGCCCAACTCACTCCAGGTATTTCGCTCTCCTCCG | | | Mouse | Rat | Human | |
| 1273 | cg05809127 | ATGTTTAAAAACCTTAATTTGATGCTATGAGGCAACCCAATCTTTCCTCG | | | Mouse | Rat | Human | |
| 1274 | cg08334962 | GCGCTGGTATTGGGGCAGCGAGGGGGCAGTTCTCTATAACGCGGTCTCCG | | | Mouse | Rat | Human | |
| 1275 | cg18736324 | CGATCAGGATTACTATAGAGATCCTCGAGAGCGGACTTTACAACATGGGC | | | Mouse | Rat | Human | |
| 1276 | cg19279986 | GTGTTCGTGTCCTCTATGGCGCTGTCAATAAAGAACGGCAGTTTGAATCG | | | Mouse | Rat | Human | |
| 1277 | cg12277787 | CTGATGCAGACCCTCATGGAAGACTATGAGACACACAAATCTAAAAGGCG | | | Mouse | Rat | Human | |
| 1278 | cg15969104 | CGCATGATGCGACCCAGCAGAGACAGCAAAGTCATTGTATCCTCTATCAT | | | Mouse | Rat | Human | |
| 1279 | cg21047370 | CGCTTCAGCAGGGAGAGAAAAACCTGACACGCCATTTCAAACCGATTTCA | | | Mouse | Rat | Human | |
| 1280 | cg00045149 | CGCCTTGCAACTCAAGCCCGTGTGCGTGTCCGACAGCCTCAAGAAGGGCA | | | Mouse | Rat | Human | |
| 1281 | cg01469140 | CTCCCAGGCTGTGAAGGCCTCCGCTTACAAGTTCTCCTAGGGAATGGTCG | | | Mouse | Rat | Human | |
| 1282 | cg01996056 | CCATGTCCCATTCTCGAATGTTATTCTGTGACATATAACCAAGTCACCCG | | | Mouse | Rat | Human | |
| 1283 | cg02270531 | CGGGGCTCCGATCCTCCGCTTTGCAAATGAGAATGACCCCAATTTCCGAG | | | Mouse | Rat | Human | |
| 1284 | cg02439040 | ACATCCAATTTGGCTTGGCGTAATAAAATCAGCCGGAGCTCCCTTAAACG | | | Mouse | Rat | Human | |
| 1285 | cg02863784 | CGGCCATAGCCTTGGCTTCCCGGCGACCTCAGCGTGGTCACAGGGGCCCC | | | Mouse | Rat | Human | |
| 1286 | cg04294034 | CGGGATTGTGTAAAGATGATTACAGCCCTATCATTAATCAGATGCCTGCA | | | Mouse | Rat | Human | |
| 1287 | cg05570491 | CGTGATTTATATTTATTCAGAGGAATAACAGAGGGTGGATCTGTTCCCGG | | | Mouse | Rat | Human | |
| 1288 | cg05917369 | CGCACTTAATATTGATTTTGTTAGTGTTCAGATTCAATAATAAGGTACTG | | | Mouse | Rat | Human | |
| 1289 | cg05933419 | CGCTTTGAAGTTTTTGTCTAATGGCTCTAAACTGAAAGAAAATGTTTTCC | | | Mouse | Rat | Human | |
| 1290 | cg07747635 | TAAAATCCTTTTGATTGACGTTGTAGCCTCCGGTGCCCTGGGCTCAGGCG | | | Mouse | Rat | Human | |
| 1291 | cg08430237 | ATCGTCATGCTGAGGATGCTGCCACAGGCAGCCACTGAGGATGACGTACG | | | Mouse | Rat | Human | |
| 1292 | cg09403176 | CGTCCGGTGTCTGCGTGCCAAGCTGTATTACCAACTGCTTGGTCTGTGCC | | | Mouse | Rat | Human | |
| 1293 | cg11160926 | CGCTATCTGTCATGCATTTTAATTTCCTGAAACGAGAGACACAAGAGCCA | | | Mouse | Rat | Human | |
| 1294 | cg11950013 | TTCTGCTCTGTCGTCTCTCCACAGCACCTTTGTGAACTCAGGAATGTGCG | | | Mouse | Rat | Human | |
| 1295 | cg12559929 | TGTCTCCCACATGGACGATGGTGGAGCTGAAGCTACACTGACTGGTGACG | | | Mouse | Rat | Human | |
| 1296 | cg12757011 | CGCTGCTGCCTGACAGGACTGCCCAGGTCTCCTAAAGGTGAAGAGTTTCA | | | Mouse | Rat | Human | |
| 1297 | cg13561157 | CCATGGGCTTCCTGCACCAGCTGCAGCTGCTGCTCTGGAAGAACGTGACG | | | Mouse | Rat | Human | |
| 1298 | cg14179336 | CTCAAAATTAGCTTAATCACAGCTCATTTAAACTTATCTAAACAACAGCG | | | Mouse | Rat | Human | |
| 1299 | cg14754937 | CGACGTGGGCCTTTTGATCAGAAAAGAAATTAGCTCTAAAAAACAGACAA | | | Mouse | Rat | Human | |
| 1300 | cg15075184 | CGACACTAAAAGTGTGTTTATCTCTGTAGGAAGTAAACGGTTAGTCAATC | | | Mouse | Rat | Human | |
| 1301 | cg16198067 | CGCCTAGCATTGGAAATGAAAGTGACATTTACGCCACAACCCACGTGTGC | | | Mouse | Rat | Human | |
| 1302 | cg19364802 | CGCTAATGAGCTGTGCAGCCCATTGATCCGGAGAACACTTCCTAATTAAC | | | Mouse | Rat | Human | |
| 1303 | cg19904709 | CGGAGCAGGAAGTGACCCCAGCTTCCCGGGCCCCTCTAGCCTGGAGTCAG | | | Mouse | Rat | Human | |
| 1304 | cg20761322 | GTCTAGCTGCTCTTCGGTGAAGATGGTCTGCTTGTTCCCCATGGTGGCCG | | | Mouse | Rat | Human | |
| 1305 | cg21596828 | CGCAACACAGGGAAATTATTATTGTCAGAATAATAATGGTTTAGCATAAT | | | Mouse | Rat | Human | |
| 1306 | cg22324081 | GCCCTACCGGCTGGAGAAGACGCTGGGCAAGGGGCAGACAGGTGCGTGCG | | | Mouse | Rat | Human | |
| 1307 | cg22560467 | CGGGTTAGTGTTTCAGTGTTCTTAACTCCAATCTGCTTGTTCATTGTACA | | | Mouse | Rat | Human | |
| 1308 | cg23127199 | CGGAGCAACATCCCCTGTCACCTGGTTGATATCTCTTGCGGATTACCCTG | | | Mouse | Rat | Human | |
| 1309 | cg23493585 | TGACTAATTACACCTTGTCAATCACCGGCTATGAAGACATAAAACCAGCG | | | Mouse | Rat | Human | |
| 1310 | cg26191916 | TCCAACAGGCTGCATAATTTTTATGACCAATTATTCCATTTGTAATGACG | | | Mouse | Rat | Human | |
| 1311 | cg26245705 | ATTACTTAGTGAGCACATCATCATTTATTTGTAATTAGCAGCGAGGAGCG | | | Mouse | Rat | Human | |
| 1312 | cg07279255 | CGGCCCTGACTCACGTGCTTCCGGTTTGAAGGCAAAAAGTGTGCCTGGGT | | | Mouse | Rat | | Universal |
| 1313 | cg24924928 | TAGGCCTCTCTGGTATCTCTGTTCTTTGGCAGAGCCTAACAAAGTGTTCG | | | Mouse | Rat | | Universal |
| 1314 | cg22882174 | CGGGGAGTATGTGTGTAAGGTTTCCAATTATATTGGTGAAGCTAACCAGT | | | Mouse | Rat | | Universal |
| 1315 | cg02753151 | CGGCTCTCAGGAGCGACCCTACTTCATGTCGCCCGAGCTGAGAGACATCC | | | Mouse | Rat | | Universal |
| 1316 | cg00195533 | GCCCTCAGCCTTGTCCTTCTGGAAAGCTCAGAGACATCTGCTGTGTCACG | | | Mouse | Rat | | Universal |
| 1317 | cg26844246 | CGCACTGAAACTTTGCCAAGAGTGCGCGGGCCCGACAGGCTCTGTGTCAT | | | Mouse | Rat | | Universal |
| 1318 | cg17589788 | AATGTGAGAGCCCTGAGGTGGACGAGGTGTTTGCCCTGACCCCCCAGACG | | | Mouse | Rat | | |
| 1319 | cg14238859 | CGGCGCATTCGGCAAGAGCTGCCTTTCATGGCCACAGAGAACATCATCAT | | | Mouse | Rat | | |
| 1320 | cg01933636 | GGTTAGCCGACACCTCTGCTCTGTGGAATTTTAATTAACTTCTCTCATCG | | | Mouse | Rat | | |
| 1321 | cg06230736 | ATGCATTCTTTCTGAAAGTATCAAGACGGCGCCAGGCAGCTCAGTGTTCG | | | Mouse | Rat | | |
| 1322 | cg20149183 | ATCAGGAGGGCAGCCTGCAAATGTCAGCGCCCGGAGAGTCCCCCACTCCG | | | Mouse | Rat | | |
| 1323 | cg12231969 | TGTCACGCTCAGCTGTGCCCAGAGCGTGAGGCTGGCAGCGCCTTTAATCG | | | Mouse | Rat | | |
| 1324 | cg03295832 | GGGTGCTCATGCTCAAGTACTTCATGTGCCTGGTGGTGGGCATCACGTCG | | | Mouse | Rat | | |
| 1325 | cg00158333 | CGCCCCACTTTCAAATCAAAATGGCTCAAGCCCCAGGCCCTGGGGGGGAG | | | Mouse | Rat | | |
| 1326 | cg09536021 | TTACTTCCAGTGAATGCTATCCATCGAGCATATTTTGTAGCTTCTCTTCG | | | Mouse | Rat | | |
| 1327 | cg02818198 | CGCCCGCTGTTGGAGGAAGAAACGGAGACTCAACATCCTGGAGGACCCCA | | | Mouse | Rat | | |
| 1328 | cg02800363 | GAACAAGGAGGCCAGAGCAGCTAATGGGAAACATGTGATTCTGCCTTGCG | | | Mouse | | Human | Universal |
| 1329 | cg22057106 | GTGTTTTGGCAACTCTAAGTTACCTAAATTAGTTTTGATCAACACTGTCG | | | Mouse | | Human | Universal |
| 1330 | cg03679521 | CTGGCATAGAGGCTGGTACCCCGCCTGGTAGAGATGCCACACTCGCTCCG | | | Mouse | | Human | Universal |
| 1331 | cg19411464 | CGTGTCGGCTGCTTCACTATAAAGCACACAGAAAAATCAAGATACACAAG | | | Mouse | | Human | Universal |
| 1332 | cg22416332 | CACTTTTCATTTTTGGGTATTAACAATCAGTCCAACCTGACAGACATGCG | | | Mouse | | Human | Universal |
| 1333 | cg15426572 | GAAAGCACTTGCTAAAATCTGATCTGTTACTTCAGCAGCTTTCAGACTCG | | | Mouse | | Human | Universal |
| 1334 | cg25139325 | TTTAATAACAGCCACTCACAGCCCAACGCCGTGTTTATATTTTACATTCG | | | Mouse | | Human | Universal |
| 1335 | cg19291010 | TTGGAATCCAGCTGGGGGTTTCCAGATGGGGACATCACTGTAGGGGGACG | | | Mouse | | Human | Universal |
| 1336 | cg25731502 | CGGTATTGATTAGTTTGGCATAGACAGATGCAGCAGTTTAGAGCAAAATC | | | Mouse | | Human | Universal |
| 1337 | cg21246299 | CGTCTGACCCGTCTGGTTTCCAGGAGCAACCAGACATGATGTAACACCCA | | | Mouse | | Human | Universal |
| 1338 | cg12923877 | CGCATGAAAATTAACTGGTGAGGGGCCTCATTGCTATTTTTAAATTGTAG | | | Mouse | | Human | Universal |
| 1339 | cg25824158 | CGGGGGCGGAGCTCTGCCTGCCAACTGAGGGGATACAGTCTCTCAGTGCA | | | Mouse | | Human | Universal |
| 1340 | cg12307242 | CGGGCTGCTAATATGATTTACCAGTCTACAGTCATGCACAATAAGTGTGA | | | Mouse | | Human | Universal |
| 1341 | cg26594414 | CGGCTGTGCTGCCTGTTGACCATCCCGCCCAGGGTCCACCGGCGATCCAG | | | Mouse | | Human | Universal |
| 1342 | cg27069680 | CCGCAACATCTCTGTGGAGACAGCCAGTCTGGATGTCTATGCCAAGTACG | | | Mouse | | Human | Universal |
| 1343 | cg13761591 | GGCTGCACGGACAAGATTGTCTGAGGCTCTTTTCACAGCATTTCCTGCCG | | | Mouse | | Human | Universal |
| 1344 | cg20895555 | CGACGCTCTGCCTAAATTAAAAAGCAACCAATCGGAACGGCCGGAAGGGG | | | Mouse | | Human | Universal |
| 1345 | cg06779064 | TCATCCTTGAACACCACGCTGCCTTCAACTAGTGCCTGGTCATCCATTCG | | | Mouse | | Human | Universal |
| 1346 | cg25651791 | TCGTAAAAGGTGAACTTTTGAACTTGGAAAGCGCCCTGGAGCAATTAGCG | | | Mouse | | Human | Universal |
| 1347 | cg26476447 | CGCAGCAGCTCATGAATATGAAACGCCCATGATGCCACCTCAGTGGACTT | | | Mouse | | Human | Universal |
| 1348 | cg04998737 | GCTCTTCAATGCTGATTATTTTATTTGCAGCCATAATTATATTTCTTTCG | | | Mouse | | Human | Universal |
| 1349 | cg01594275 | CGGGAGCAGAGAGCAGGTCATCAACGGCGACAAGGACATTCAATGATGCA | | | Mouse | | Human | Universal |
| 1350 | cg14676280 | ACACTCACTCTGCTGTGACCTAATAAGGTGATGGTGCTATACTTCAGACG | | | Mouse | | Human | Universal |
| 1351 | cg09363187 | GCGGAGGAGTTCAAGCGCAAGCACAAGAAGGACATTGGGCCCAACAAGCG | | | Mouse | | Human | Universal |
| 1352 | cg07564343 | AGGGGATTTTCTCCAGTGTTTCTGATTAACCCTGTTACATAACCCGCTCG | | | Mouse | | Human | Universal |
| 1353 | cg17049911 | CGCCGCCGGGATGAGCCGCCCCCTGGACACCAGCCTGCGCCTCAAGACCT | | | Mouse | | Human | Universal |
| 1354 | cg17708456 | TTTGGAGCGATTTATCACTTTGATTTGGAGATCTTGTCAGATGGCAATCG | | | Mouse | | Human | Universal |
| 1355 | cg19707231 | CCGAGAGACCCAAGGGAATGATTCGGTCAGGATCCTTCCGAGACCCCACG | | | Mouse | | Human | Universal |
| 1356 | cg15168457 | TTATACTTTCCTTCATATCATTTGTTCTGTCAGGTGTTCCCTGGCCATCG | | | Mouse | | Human | Universal |
| 1357 | cg20212950 | CGAAGGCACGATATGCGTGTCCATCCTTACCAAAGGATTGTGACCGCAGA | | | Mouse | | Human | Universal |
| 1358 | cg21126148 | CCGCATTATCAATGACCGGGAGATGAGGGACGCCATAATCCTCATCTTCG | | | Mouse | | Human | Universal |
| 1359 | cg15340018 | CCTCGGATATTATTCCCATTTACCAGGGCAAAACTCAATTCCATTGCACG | | | Mouse | | Human | Universal |
| 1360 | cg09661817 | TCACCCTTTACCTGGAGCAAACCAAAGCCTGGCCACACCCCTATATTTCG | | | Mouse | | Human | Universal |
| 1361 | cg00489428 | GAGGTAGACACGGTCACATTCGGGGGGGCATCTGAGTCTGGCATCTTCCG | | | Mouse | | Human | Universal |
| 1362 | cg00593462 | CGCCAAGTCCCAGAAGGAAAACCCGCTTTTTAGCGGGTAGAGGATCAAAT | | | Mouse | | Human | Universal |
| 1363 | cg01019040 | CGGCGTGGACACCCCGCAAGCCGGCTATTTCGGGCTCTTCCACTACTGCA | | | Mouse | | Human | Universal |
| 1364 | cg03588035 | CGTCCAGGCTGTGGAGGGAGACAAAACCGTGAGCCTCCTGGTTAATGCCA | | | Mouse | | Human | Universal |
| 1365 | cg04087693 | TTAACCTACCCAACAGCCCGTGAAGAGTTAAGTAAATGCGGAGAGAGTCG | | | Mouse | | Human | Universal |
| 1366 | cg04353319 | CGGGGGAGCACGGGGAGAAAAATCAATGTCTCTCAAAATATTTGCAAAAT | | | Mouse | | Human | Universal |
| 1367 | cg04680480 | CGGCACATTCTGGAGAGCGAGAAGTGCCAACTCCAGAGCCAGGTGGAGCA | | | Mouse | | Human | Universal |
| 1368 | cg06655463 | TTTGACTTAAAGTGTGTGCTATTTATTATAGCAAACATCAACAGCCTTCG | | | Mouse | | Human | Universal |
| 1369 | cg07292994 | TCAGAACAAAATGCCGACCGGAAGTGCAGCTGCAGGAATGACTCCCTCCG | | | Mouse | | Human | Universal |
| 1370 | cg07782608 | GAGGCTGATGGAGAACAGGCACTGAACGCTAATCCCTTTTTCTATTTCCG | | | Mouse | | Human | Universal |
| 1371 | cg09362546 | CTTGCGCGACGGAGAGCAGAAGTTGCCCAGGTTGACCGAGTTAAACATCG | | | Mouse | | Human | Universal |
| 1372 | cg10278760 | GCTCGGTCCATTTCTGGGCGCTGCAAGATCAGCAGAAACCTGAGAAAGCG | | | Mouse | | Human | Universal |
| 1373 | cg10810311 | CGGTATTGTTCTCTATTGCTGTAGAAAGACTGGTTATTAGCCATAAATGA | | | Mouse | | Human | Universal |
| 1374 | cg13160087 | AGGGGTATGATGTTTGCAATGCATGCATTTCAGCAGGTCCCATTAGTACG | | | Mouse | | Human | Universal |
| 1375 | cg16867657 | CGGCGGCTCAACGTCCACGGAGCCCCAGGAATACCCACCCGCTGCCCAGA | | | Mouse | | Human | Universal |
| 1376 | cg17776554 | CGGGGCTGTGAGTTTCAAATTAACCTTCCGCTTTGTTGCTGTGTAATGTG | | | Mouse | | Human | Universal |
| 1377 | cg18168101 | CGCCCAGGGCCGCCTCCGCCCCGCTTTGGCCCATCTGCCATCCCCTGGCC | | | Mouse | | Human | Universal |
| 1378 | cg18963985 | TTCGGATCGCAGAGCTTTCAGACAGTCTCAACTGATAGACAGACACATCG | | | Mouse | | Human | Universal |
| 1379 | cg19663246 | AAGTCACCGGAGGCTCTATGATGTGAAATGTACAATCGAATTAGAACTCG | | | Mouse | | Human | Universal |
| 1380 | cg19683912 | CGGGAGCATAAAGCAGAAAAAAAATTAATGGAAAGGCATTTCACCTCCTC | | | Mouse | | Human | Universal |
| 1381 | cg19719499 | CTGGACTATGTTCCGGAAACAGTATACAGAGTTGCCAGACACTATAGTCG | | | Mouse | | Human | Universal |
| 1382 | cg19927064 | CGAGTCCTCAAACCCGGGCACGTAGGAGTCGTCATACATGGGGGAGTCCG | | | Mouse | | Human | Universal |
| 1383 | cg20424997 | CGCTGCCTATTTTCGCATGTGGATTTCAGTGGCGATGGTAAAAGCAGTGG | | | Mouse | | Human | Universal |
| 1384 | cg21617338 | ACATTTTGCTAATTTTAGTTTTACGGTGGGGTAATAGCACATGCCATACG | | | Mouse | | Human | Universal |
| 1385 | cg22454769 | CTTGGGAGCACAGTAGTTATCGGGAGCGTCGCCTCCGGCGTGGGCTCTCG | | | Mouse | | Human | Universal |
| 1386 | cg23088328 | ATTTGATGCCATCAAAGGGCTGTAGATTGAAACCAGATGTGCTCGCCTCG | | | Mouse | | Human | Universal |
| 1387 | cg23510032 | TTTGCTGGCTTGTTAATTTTATCCCCACTAACTGTGATTTCTGATAGCCG | | | Mouse | | Human | Universal |
| 1388 | cg23783364 | GGGCCTGTGACAGCTGAAATGATTGCACACAATTGCCAGTCAGTCATGCG | | | Mouse | | Human | Universal |
| 1389 | cg26260350 | CCTGATGAAGATTGATCACCTTTCTACTGCCCTCCCCGGGTATGTGAACG | | | Mouse | | Human | Universal |
| 1390 | cg27228973 | CGTGCCGACAGGCAGACCAGGAGCTGCTGCCACATGAATCACTTGAACTT | | | Mouse | | Human | Universal |
| 1391 | cg13202239 | ATTTTCTGTCTGTGAAAGCCTTTCTTCCCACCTCTGTTCAGATTAGCCCG | | | Mouse | | Human | |
| 1392 | cg06810447 | CGCTGCCGTACAGGTCACTGGCCACGGAAAGGCTATCCTCTGACCCCCAG | | | Mouse | | Human | |
| 1393 | cg13459195 | CCAGATCGGCATGAAGAGGCTCAAGGTGCAGCTGAAGCGGCCCAAAGACG | | | Mouse | | Human | |
| 1394 | cg16762797 | CGGGGGTCCCCAGTCCCCGGGCCACGGATCCACCTTCCCATGTAAGACCC | | | Mouse | | Human | |
| 1395 | cg21623348 | GCCATCAAAAGGATATCACAGCTCATTTTGGTGGAAGGGTTTCCACGTCG | | | Mouse | | Human | |
| 1396 | cg08716535 | TGCCTTTGTTTTGCTCCAGAGTTCGCTCCAAATGCTCATCTTCTTCTTCG | | | Mouse | | Human | |
| 1397 | cg06358839 | CGCTGGGAGCAATAAGTCCATTTAAAAGCCCTTTATTTAAAAGGAACAAA | | | Mouse | | Human | |
| 1398 | cg23647082 | TTAGCCCCCTTATCTGCTGAGCAATATAGTGGCAGGGCTGACCTCTTTCG | | | Mouse | | Human | |
| 1399 | cg10566829 | ATTTTCAGTTTTTAAAAGCCACCTTAGCCCGCCATATTGAAACTGGCACG | | | Mouse | | Human | |
| 1400 | cg19870489 | CGGGTTGTGTTTCTTTAACCCCTGGGGCCTGTTGACACAGATTAGTATCG | | | Mouse | | Human | |
| 1401 | cg20595453 | TCCTGACTCAGAGATTCCACTGATGATTTCCAGGAACTACCAAAGCCACG | | | Mouse | | Human | |
| 1402 | cg17543458 | GCATGACAAATTATGAAACACATACTGTGAAAATTATGGACTCTGTCACG | | | Mouse | | Human | |
| 1403 | cg09207276 | AAGATTTATGGCTTTGAAGTTTGCCGCTACCCAATCATCAAAGAATAGCG | | | Mouse | | Human | |
| 1404 | cg19458915 | ATGAATCAAGAAGACTGACCAGAAACTGACTCCCCTGATAACTAAGGACG | | | Mouse | | Human | |
| 1405 | cg00519323 | AGGGGCTTCGGGCAATTCATCATGGAAATTGGGTTTCTTAGCAGACATCG | | | Mouse | | Human | |
| 1406 | cg21371906 | CGGCCTGCCTGCTTTTCCAGCTGGAGCTGTTCATTCAGAACAATTAGCAT | | | Mouse | | Human | |
| 1407 | cg18913902 | GCCAGGAGTTGCCACTGACTATGGAAATTGCCACACCAGGGCTATAAACG | | | Mouse | | Human | |
| 1408 | cg24643424 | ACGCTTTTGGTCAACTGTACTCTGTAGAAAAAACAGGCACACTTGTCTCG | | | Mouse | | Human | |
| 1409 | cg06129152 | CGGATCAAAGAACAGCAGCAGTTTTGATTTGTGTTAATTTTGCGTGTACA | | | Mouse | | Human | |
| 1410 | cg06699148 | AGTAGGCAGCTCCTGTGCTACCGTATTATAGGATTCCAGCGCTGTCGTCG | | | Mouse | | Human | |
| 1411 | cg07571117 | CTCCATGAGGTCACACTCCATGCTACTGTGGTATTCAAATTTCCGAGTCG | | | Mouse | | Human | |
| 1412 | cg25483422 | CATTCCGAATATAGAGAACCTCAATCTCTTTGTCCGTGGTGTTAACACCG | | | Mouse | | Human | |
| 1413 | cg08665877 | CGCTGCCTTTGCTTTAAAACAGTATTACTTGCGGTGAGTAGTAGTGACTT | | | Mouse | | Human | |
| 1414 | cg09731876 | TTAACTAACAACTCATTAGCTTAGTTGATGTTTTTGTCAATATTAATTCG | | | Mouse | | Human | |
| 1415 | cg10067218 | AGCCAAATGATCACCTTCACCTTTGCTAATGGAGGCGTGGCCACCATGCG | | | Mouse | | Human | |
| 1416 | cg07751402 | ACTCATCTCCAGGAAGGACTTCGAGACCCTCTACAATGACTGCACCAACG | | | Mouse | | Human | |
| 1417 | cg12476049 | CGTTGCTGATGACAGAGCCATTCTCACTGGGCGACCTGCTGGAGGTAACC | | | Mouse | | Human | |
| 1418 | cg10724086 | CGGCTAAGAGCAGGTGAGTCACAGCACCGGTTTATATCTTTATGACATAA | | | Mouse | | Human | |
| 1419 | cg20610710 | CGGGGTTGATCTTCCCGTAAGATTCACAGCAACACAGCCTCTTGACTTCC | | | Mouse | | Human | |
| 1420 | cg20682817 | GGCAGTTGCAATCAGTTTCCGAAAGGTCAGCCAAGGTCCTCCGGCTCTCG | | | Mouse | | Human | |
| 1421 | cg25579908 | TCATAATTGTAACTGAGGGTGACAGGGTCACCTTGAGCCCCAGATGCTCG | | | Mouse | | Human | |
| 1422 | cg14769599 | GGATCCCTAATAGGAAATGCTTCAACAAACAACAATGCAGCATTTGATCG | | | Mouse | | Human | |
| 1423 | cg13107358 | GTAAAAGCACGTTCATTTCCAGGCACTCTCATTCATAGAGCCAGCGGGCG | | | Mouse | | Human | |
| 1424 | cg13132708 | CTGTCACTGCATTCCTGCTCCCCCTCCCTCTAGCTGGGTTTGTCAAGTCG | | | Mouse | | Human | |
| 1425 | cg19331623 | GTGTAATATTAATAGTCATGAATATCTGCTATTAGGAGGCTCCAGGAACG | | | Mouse | | Human | |
| 1426 | cg24677551 | GGAGCAGCCATTAAAATGTCGCCCGGAGACAGTAATAAAAGGCTCGGACG | | | Mouse | | Human | |
| 1427 | cg25424749 | CGGAAAATAAAGTTCAGAGCTGATCAAATTTGAAAACAGATGTCGAATCG | | | Mouse | | Human | |
| 1428 | cg22025998 | CGGTAAATAGCTGCCAAATTATGGATCATGCCGAAGTGTCACAACTGCAC | | | Mouse | | Human | |
| 1429 | cg21249921 | CGGCGGAGAGAACAGCCAGTTGTTTAAAATCCTTCTAGAGCAGTTTCTAA | | | Mouse | | Human | |
| 1430 | cg16595936 | CCAGCTCGTCCCTTTCAGGGGGGACTCATGCATCAAACTTCAATTTTCCG | | | Mouse | | Human | |
| 1431 | cg14927488 | CGCCCTATTTTCCAAAGTCTAAAATGGACATATGTTATAACTGTCTTGGG | | | Mouse | | Human | |
| 1432 | cg24124633 | CGCCGTGTGGTGTAAACAAACCCTGGATATTTTATATGAATTAAATGTGT | | | Mouse | | Human | |
| 1433 | cg17325863 | TTCATTTCTCGCTCTACCTCCTGTTGCATAAAATGATGCGCTGAAGAGCG | | | Mouse | | Human | |
| 1434 | cg23662675 | TTCTATGCACAGGATGGCTCTTGCTCACCCGAGCCTCACAAAGATAATCG | | | Mouse | | Human | |
| 1435 | cg26375896 | TATTTTGCTGTGCAAAATTGTTTTATATCTTGAGTTACTAACTAACCACG | | | Mouse | | Human | |
| 1436 | cg08683365 | CTTGGCCATATATGATGATGGCATCACTTCCCTCACTGCCACAAGAGTCG | | | Mouse | | Human | |
| 1437 | cg09401976 | GGGCCTCGATGAGAGAGACGATCTCCTTGGCGAAGGGCAGGTTCTCCTCG | | | Mouse | | Human | |
| 1438 | cg21118011 | CAGCTTGGTGGAGGCCTTATCCACTCCCACTTGTCCTGTTTGGAGGGACG | | | Mouse | | Human | |
| 1439 | cg01153660 | CCGGGAATGCGATGCATTTGTGTAGCGTGTGCAAATGGGCGCCGCGGTCG | | | Mouse | | Human | |
| 1440 | cg20128948 | CGTCGCCCTCAATTCCACCGCCTATGATCCAGTGAGGCATTTCTCGACCT | | | Mouse | | Human | |
| 1441 | cg04084157 | AGCATTTCATTCATTCATTCATTCATTCATTTCCCGGAGCTCCGCTAGCG | | | Mouse | | Human | |
| 1442 | cg13585349 | CGGGGACTATCTTGCCAGACAGCACTCTGGAGCCTGCCTACCGCCCACTC | | | Mouse | | Human | |
| 1443 | cg12946524 | ATAACTACCAGGAGGGTTTGATGGGGGATTCCGCCATGTCAATGATGTCG | | | Mouse | | Human | |
| 1444 | cg00672891 | ATCCCTCCTTAGTCCTCTATGAACTTCATCAAAATGCCTCCTTACATTCG | | | Mouse | | Human | |
| 1445 | cg09010998 | GGATCATGGCGGATGGCCCCAGGTGTAAGCGCAGAAAGCAGGCGAACCCG | | | Mouse | | Human | |
| 1446 | cg18872272 | CCATAAAGTCCTTCTGATTCCCGCATCTCTTCATTCATTCTTGCTAAACG | | | Mouse | | Human | |
| 1447 | cg02572855 | AGATAAATAGCAGAGTGTCCTCCTCAAAAATATGATTAATACCCTACTCG | | | Mouse | | Human | |
| 1448 | cg12837065 | CGGCATCTGACTGTACCTGTCTTGTTCTCTGCAGCATCTGTCTGCTACAC | | | Mouse | | Human | |
| 1449 | cg23773983 | CGGCGGCGGCAGCCAACTGCTCCATATTTGGCTTCTATTACACATTTACA | | | Mouse | | Human | |
| 1450 | cg02793066 | CGCACTGCAGGAGAAGGACACACAGACCAAACTGGAGGCAAGGCCACCAG | | | Mouse | | Human | |
| 1451 | cg04585931 | CGCTCACACCAAAAGCCACACACAGAAAACCAACAACGTGGGATGGGAGG | | | Mouse | | Human | |
| 1452 | cg23849723 | CGTTCATCAGTGTCAATGGCACTGAACCCTGTTTCAGGCCCATCAGTGTT | | | Mouse | | Human | |
| 1453 | cg04147092 | GGGAGGCGTCGACGTCATAATCCCCGGAACGTAAACATTGTTGCCGATCG | | | Mouse | | Human | |
| 1454 | cg26022924 | AGGACCTAATAGGTTTCGCTCTTTTTGGAGCTCATCAGCTGCAGGTAACG | | | Mouse | | Human | |
| 1455 | cg10797933 | CGCTGGAGATCTCTGTTCAGTCTGTGGTGACAACATCGGAGCTGTCAACG | | | Mouse | | Human | |
| 1456 | cg02216125 | TTTGGTCCATTGTCAAGAAAAGCCTTGCGAGGAACCCAATGGTGTTCTCG | | | Mouse | | Human | |
| 1457 | cg03045876 | GGAGGAGTTCAAGCGCAAGCACAAGAAGGACATTGGGCCCAACAAGCGCG | | | Mouse | | Human | |
| 1458 | cg17620221 | CGTACCCCACACAGGAGAAGTTTGATGTTGACAAACTTCTGGTGGCAGCG | | | Mouse | | Human | |
| 1459 | cg26828755 | CGGTTAACCTCGCAGTACTAAAACTGAATGAACAAGGCCTGTTGGACAAA | | | Mouse | | Human | |
| 1460 | cg24205097 | GGGTCAAGTTTCAGCGGCACTCCGCCCCCAGGGTAGGTGTGAAAGACACG | | | Mouse | | Human | |
| 1461 | cg13235828 | CAGAACTGTCAACCATGCAGAGTGAAAGGATATCCCAATAGAATTACCCG | | | Mouse | | Human | |
| 1462 | cg03810913 | AGTTGAAGTGTCAGATTACATTGGCTATTCTATTTCCAAAGGGCCCCGCG | | | Mouse | | Human | |
| 1463 | cg26617601 | GGGAACCCAAGATGGGCCAAGTGGTGTATGTGCCGGTCAAGACGGGCTCG | | | Mouse | | Human | |
| 1464 | cg00793774 | CGCGCAGGGGCAGTCATTCAGATGAAATTCCAGTCCCCGGCCAGAGACAC | | | Mouse | | Human | |
| 1465 | cg14898663 | CGGGGCCAGTCTTCAGCATTAATAAAAGATTCCAAGAACAGGGTGACCTT | | | Mouse | | Human | |
| 1466 | cg18766286 | CGCGCTCTCCGTTTGTGAACCCATTACCAAAGAGCTATAGCTGTACTGAT | | | Mouse | | Human | |
| 1467 | cg02169296 | CGGGGCAAGTGTCTTCATGAACCCAGAGGATGTCCGGGAAGCACTACAAG | | | Mouse | | Human | |
| 1468 | cg03957964 | CCATGGTGACTTTCTTCGGGGGCCTCTTCATCATCTTGCTCTGGCGGACG | | | Mouse | | Human | |
| 1469 | cg14204200 | TACATGGACAGCCTAGACATTGTCACCAGCAAGGTGTCAAGCCTCTTTCG | | | Mouse | | Human | |
| 1470 | cg13529178 | CGGGAAGCTAAATAGTTGTACCTTGGACTACCTTCCCACAAGTGCAGGGA | | | Mouse | | Human | |
| 1471 | cg13694139 | CGACCGTCATCTGTAAAAAATGTCTCAGTGAGAGATAATCATCGGAAACT | | | Mouse | | Human | |
| 1472 | cg24932816 | CCACTGGGCGGCCGGATTGTTCAGGCGGAATAATAAAACCTGCCAATCCG | | | Mouse | | Human | |
| 1473 | cg16604235 | TTCCCCCTGAACAGTAACCTATTTGAATATGATTAAAGGGTTTCATTACG | | | Mouse | | Human | |
| 1474 | cg00027948 | CGGTCTTTGGCAATCAGGTCCTGGGCCTCTAATACATGGATCCGAAGCAC | | | Mouse | | Human | |
| 1475 | cg00597234 | CCACCTTGATGCAGTCCTCGTTGGCGATGTTGAGCACGTTGGTCTGCACG | | | Mouse | | Human | |
| 1476 | cg01292864 | CGGGGGAGCTGGCTCCAGCCCCAGGATACACCGAGGAAATTAGTTTGTCT | | | Mouse | | Human | |
| 1477 | cg01418317 | CGGGCGATTAGCACCCATTGCATGAATTATGAAACAATAACTTTCGGAAG | | | Mouse | | Human | |
| 1478 | cg01431979 | AATATTCATGAACAAAGTCTGGGGTGATCAATCTATCTTTATTGTCTGCG | | | Mouse | | Human | |
| 1479 | cg01464821 | AAGCCACCAGCATTGCCAAGCCCAAGCCGCCAACCAGAATGTAGAAGACG | | | Mouse | | Human | |
| 1480 | cg01695075 | CGGTTTCCATAGCAACCAGCCAACGGGCCACTTTCTCAGAACAATTCCCC | | | Mouse | | Human | |
| 1481 | cg01742897 | TGATAATAATAGGTTTCCCTGAAAGATACATTGTAATCCATTCACATCCG | | | Mouse | | Human | |
| 1482 | cg01767626 | TTGTCGATTTTGTTTGCACAGAGGACGGCGACAGCTTCCTCAGGCTGTCG | | | Mouse | | Human | |
| 1483 | cg02026974 | ACTCTAGGTATTTCAAATCTGATGCTTAGACCACTAAGCCATCCCCTCCG | | | Mouse | | Human | |
| 1484 | cg02046143 | TTTCCACACGTGGCTCCTCGCTGCTTTGTTGCCTGGGCCAGGGAAGGGCG | | | Mouse | | Human | |
| 1485 | cg02298641 | CGGGAAATCATTAAACAGGAAGAAAGTGTGGATCCTGACTACTGGGAGAA | | | Mouse | | Human | |
| 1486 | cg03069282 | CCTGCCAATCGCTCCTGGCACGAGCTGGGTAACAAATGCCTGTTACCTCG | | | Mouse | | Human | |
| 1487 | cg03334831 | CCTCCCGCTGCTTCAGCTTGAACTTCATGTTTCCAAAGTGCATGATGGCG | | | Mouse | | Human | |
| 1488 | cg03549582 | CGCAATTAAAGATGAACTTTGGGTGAACTAATTGTCTGACCAAGGTAACG | | | Mouse | | Human | |
| 1489 | cg03552156 | AAATAAAGCAAATGAACCCACCGAAAACTGCTTGGCAAATATTTTTCTCG | | | Mouse | | Human | |
| 1490 | cg03746976 | CGCAATTGTATTCAAATCAGGAAACGGACCTAGGATGGTACAGGGATGTG | | | Mouse | | Human | |
| 1491 | cg03786140 | CGAAAACTTCAGGATGCAGCAGAACAACTAAAACAGTATGAAATAAACGC | | | Mouse | | Human | |
| 1492 | cg04288975 | CGAGAACACCATTTCCTACGAGACCACTGCCGCTGGGTGCATATTCAATT | | | Mouse | | Human | |
| 1493 | cg04787627 | CGCCAAGAGAAAGATCTTGGCCGTCTTCAGGTAGACATGGATGAACTTGA | | | Mouse | | Human | |
| 1494 | cg05473517 | CGGCGACGGGGCCCATCAGTAACTATTACGTGGACTCGCTCATCTCTCAC | | | Mouse | | Human | |
| 1495 | cg05675336 | TCTCCTGTACACATCATAGCCACTAGCAAAAGTTTACATTCCTATGCACG | | | Mouse | | Human | |
| 1496 | cg05791872 | GCAGCTGCCATCTGCACTATTGTTTCTATTGCTGATTTATTAAAGTACCG | | | Mouse | | Human | |
| 1497 | cg06144905 | CGGGGCCCTCTAGAATCTCTAAAGCAAATCAGGCTGAAGAGGGGAAAACC | | | Mouse | | Human | |
| 1498 | cg06488465 | CTATAGAAAAACCGCCACAGACGGCCGTGGCAGCTGTTGCTAAGGAGACG | | | Mouse | | Human | |
| 1499 | cg06767010 | TTCCGCGGCTATTGGATTAGTGGCCTTCAGGGATGAGCTCAGCCAGATCG | | | Mouse | | Human | |
| 1500 | cg07589899 | CCTGGAGCATCAGGGCGGTGCCTTGGAGGGCAGGATGATTTCGGGCTGCG | | | Mouse | | Human | |
| 1501 | cg07797757 | CGGGCAATTCATCATGGAAATTGGGTTTCTTAGCAGACATCGTGTGAATC | | | Mouse | | Human | |
| 1502 | cg07978595 | CATCTTGTTGGGGCTCTGCTGGATGGCCATGGTGATGAGCGAGATGTACG | | | Mouse | | Human | |
| 1503 | cg08179663 | ACGGCAATATGGCGAGAATGCCTGGCAGCGGGGACTGTAACACCAGCGCG | | | Mouse | | Human | |
| 1504 | cg08536905 | AACTATAGCTTTAAGGTATGCATACTCATAGCCATCTATATCCAGCTTCG | | | Mouse | | Human | |
| 1505 | cg08659673 | TTTGAACTGAAAAGCTCTCAGTCTAACTTCAACTCACTCAAATCCGAGCG | | | Mouse | | Human | |
| 1506 | cg08992759 | CGCGGCCCACACCTGGGACAATGAGCAGGAACCCAGGTGAGCAGTTTGTG | | | Mouse | | Human | |
| 1507 | cg09019552 | ATTTAGTGGGGGGCTCAATGGCGTACTCTCTGAAGGTCACTTCGCGCACG | | | Mouse | | Human | |
| 1508 | cg09075239 | CGAAGCAGTGGGGGCTGCCAAGGAACATGATTTACTCCTTGAGCATGCAC | | | Mouse | | Human | |
| 1509 | cg09268729 | TTATCCTTTTAATTACAAGCTGTAGACAGGGCCAACTTCGAAGGTCTTCG | | | Mouse | | Human | |
| 1510 | cg09691053 | CGCCCAGTGAGAATGGCTCTGTCATCAGCAACGAATCAGGGAAGCCCAGC | | | Mouse | | Human | |
| 1511 | cg09810328 | CGGGCAGCTGCTGTCAACAGTAGTGCGGACTCTTGCCACCCAGAGGTAGT | | | Mouse | | Human | |
| 1512 | cg09837345 | TACCTTGAGCTTCACTTCCTGATCCACCTTCAGCAACGAGGCCATGGCCG | | | Mouse | | Human | |
| 1513 | cg09878190 | AGTAGTGGAAGAGCCCGAAATAGCCGGCTTGCGGGGTGTCCACGCCGTCG | | | Mouse | | Human | |
| 1514 | cg10005379 | ATTGCCTTTCTAATTGATGGCTCCAGCAGTGTTGGAGATAGCAATTTCCG | | | Mouse | | Human | |
| 1515 | cg10083251 | TCTCCCACTTTTCCATAAGCAGAACAAGAACCAAATCAAACGTCTTAACG | | | Mouse | | Human | |
| 1516 | cg10084308 | CGACGCCTTCCGGGCGCACGCCGAGCAGAACTCCACCGACACCTTATCCT | | | Mouse | | Human | |
| 1517 | cg10152338 | GATGACCTAACACGCTCACACCAAAAGCCACACACAGAAAACCAACAACG | | | Mouse | | Human | |
| 1518 | cg10855531 | TCCACTGTGTCTGTCCTGTCTTGGGGCACAGCGGCAGAGGCATGCCCACG | | | Mouse | | Human | |
| 1519 | cg11453286 | CGTAACGCTGGCAATTTGTAGTACAAAAATGGATGCTTAATTCATGTCTT | | | Mouse | | Human | |
| 1520 | cg11804981 | CGGGCTAATGAGGTAAACTGAAGCGAGCCCTGTCCCCCCTGACAGGTTTA | | | Mouse | | Human | |
| 1521 | cg12091099 | CAGTGGTTAATTTGAAACTACTTCATGTCAGTTTCTTTCAGAGCAATACG | | | Mouse | | Human | |
| 1522 | cg13265357 | TCAGCACCATCTGCACAGGCTCATTTGTTGCTCCTGAGGCAGCCCACACG | | | Mouse | | Human | |
| 1523 | cg13283797 | GGGCCGTTCTGTTGAGTGCACTTGTCTGACGTGACTGTTGAGGTGATCCG | | | Mouse | | Human | |
| 1524 | cg13324564 | GGTGTTTTATAAGAGCCTTTTTCTTCATTAAATGGCATTCATTAAGCACG | | | Mouse | | Human | |
| 1525 | cg13672945 | CGGTCCTGGGCCTGAGCATCCATGGTGGGATTCCAGTCGCTGTCATAAAA | | | Mouse | | Human | |
| 1526 | cg13772936 | CGGGGCAGCCTTCCTGACCGACTACAACAACCAGGCCGACACCACCTGGT | | | Mouse | | Human | |
| 1527 | cg13850544 | CGCACCTGCGGTCCGGAAGTTCTCCCCTGACCTTAAGTTGCTTAAGGATG | | | Mouse | | Human | |
| 1528 | cg14064625 | CGCTCTCTTTGTTGCTTATGCCGATAAGCATGGGTTTCCTTGGTGCAGTG | | | Mouse | | Human | |
| 1529 | cg14833518 | CGGCCACGCTCCACACCACGATGACCAGGGTCATGAAGCAGGCCACCAGC | | | Mouse | | Human | |
| 1530 | cg14877474 | CGCTTAAATATACACAGGAGGCAGGAGATCCTATAATCCAACCTCACATT | | | Mouse | | Human | |
| 1531 | cg15354625 | ATGCTGAAGACCATCAACCTACAGAATGAGGGCTTCACCTGCACCATCCG | | | Mouse | | Human | |
| 1532 | cg15514262 | GGGGGGTATCTGTGTCCCAGAGCCTCATCCCCGACATCAAACCCCTGGCG | | | Mouse | | Human | |
| 1533 | cg16023422 | CGCGCGCTGCCGTCCCGGATCAGCCAGAGAGACCATTAAAATTTTATGCA | | | Mouse | | Human | |
| 1534 | cg16335529 | ACCTGAGCAGCCTTGGCAAATGTTGGCCCATGGTAGCGGCCACCAATGCG | | | Mouse | | Human | |
| 1535 | cg18182637 | CGTGGCTCTCAAAGTTCAGACTCTTCTAGTAGCTGTATGTATCTCAATCC | | | Mouse | | Human | |
| 1536 | cg18560921 | CGGTAAGTACCACTTTACTGTTCATAAGAATTGCAGAGCAATGGTGCTGA | | | Mouse | | Human | |
| 1537 | cg18650762 | TGAGGTGATGGCAACGGCCAACTTCGGCAAGATCCAGATCGGGATTTACG | | | Mouse | | Human | |
| 1538 | cg18933331 | GGTTCAGCCACCTTCAAATACTGCATCAATGGCTCGTGCCTCTGCCTGCG | | | Mouse | | Human | |
| 1539 | cg19755705 | TAGCTACTGTTGCTCTTGCTGATGCTGTAGCTCCCGCTGCTCCTGCCGCG | | | Mouse | | Human | |
| 1540 | cg19899882 | CGGCCCTGGGGCAAGGACAACTACTGGATGCTCAACCCCAACAGCGAGTA | | | Mouse | | Human | |
| 1541 | cg20150793 | CGCCTACCTAGAAACATTTTGAAATGCCAAGTTGTTTTAAACTTGTATGA | | | Mouse | | Human | |
| 1542 | cg20303044 | GCAGGCCAAAAAACGCTATTTCATCCTGCTCTCAGCTGGCTCTTGTCTCG | | | Mouse | | Human | |
| 1543 | cg20464004 | CGCACAATAAACCCTGTCATATAAAAGCAAACTGGATAAAATAACAGAAG | | | Mouse | | Human | |
| 1544 | cg20516274 | CTGCGGGGGTGGGGTGGTGGTAGACGTTGGCCGAGCTCTTGGCCAGCACG | | | Mouse | | Human | |
| 1545 | cg20558754 | CGAAAGTTATTGTTTCATAATTCATGCAATGGGTGCTAATCGCCCGCTCG | | | Mouse | | Human | |
| 1546 | cg20646588 | ACTCTTCTGGCAAGGCATTGCAGGACCCCTACTTTCTTAAAATTCATACG | | | Mouse | | Human | |
| 1547 | cg20697952 | CGGAACAGGACGCCCTCTGATGTGAGCATTTGCCAAAAATATCTCTGTCG | | | Mouse | | Human | |
| 1548 | cg20709200 | TTAAGATCAAAATCTGCGAGGCCGTGAGCTTGAAGCCCACAGCCTGGTCG | | | Mouse | | Human | |
| 1549 | cg20740396 | GCCATGGCCCAGATTCTGCCAATTCGTTTTCAGGAGCATCTCCAGGTGCG | | | Mouse | | Human | |
| 1550 | cg21611883 | GTTTATCTTGGCACTGGCAAGTACAGCAGTCTCTTCGATGTCTGGAAACG | | | Mouse | | Human | |
| 1551 | cg21646906 | CAGTTGGAAATGATTCAAAGCTGTGGTTTCACATGTTATCTGTAAAAACG | | | Mouse | | Human | |
| 1552 | cg21812916 | GGGTGCTCCAGGTGTTTGCCCCAGCCCCAGACAGCCAGTGGGAGGTGACG | | | Mouse | | Human | |
| 1553 | cg21836538 | CGCCGCTGTGGCTGAGAGCGAAGTTTCAGAGACTCTTATTTAAACTGGGT | | | Mouse | | Human | |
| 1554 | cg21972990 | TTTCTGACTTCTTAACTTGTCAGCAAATCCCAGAGTTAAAAATGCACACG | | | Mouse | | Human | |
| 1555 | cg22571854 | TCAGAGCACTGCGGTATATACTCATGTCATGAGCATCATACCACTCATCG | | | Mouse | | Human | |
| 1556 | cg22598041 | CGATGTCTGAACAAGCTATTGAAACTGTAGCAATCAAGTGGACTCTGGTT | | | Mouse | | Human | |
| 1557 | cg23014365 | TTATTCTTGTGTGGCCCTCGTAACATAAATGTAAATCTTTTATGCTAACG | | | Mouse | | Human | |
| 1558 | cg23124451 | CGTCCGATCCTAATCTCCAGCTCAGGCAGGCTCGGCCGCCACTAGCATCC | | | Mouse | | Human | |
| 1559 | cg23252695 | CATGCGATCCAAGGCGAGGGCGAGGAAGCTAGCCAAAAGTAAGTCTCCCG | | | Mouse | | Human | |
| 1560 | cg23500537 | GCAGCCACACATCCAAGGCTGACAGGGCGGGCACTCTGCCAAGTCCTGCG | | | Mouse | | Human | |
| 1561 | cg23563241 | GCCCCAATATCCCTGCCTATAACATGCAAACTTGTGGGAACTATGGATCG | | | Mouse | | Human | |
| 1562 | cg23805159 | GCTGAGAGCTTTTGTGTTTAATGACCTTCAGCTACCGGGAGGCAAAGCCG | | | Mouse | | Human | |
| 1563 | cg24076142 | CGCCGAGCTGCAAACCACACCCGAGTCCGTCCAGCTGCAGGACAGCTGGG | | | Mouse | | Human | |
| 1564 | cg24363217 | CGCTTTCAGCACCACCATCCACGTGCCCAACATTGCCACAGGAGAGCAGC | | | Mouse | | Human | |
| 1565 | cg24930802 | GCCAAGCCTGGAGCCCGTCCAGGCTTTTCATTAAGGACATAATATTTACG | | | Mouse | | Human | |
| 1566 | cg24998102 | TTTCTCCCTTTCTAATGACATTTACCGGATCAAAACATGCTGTTAATTCG | | | Mouse | | Human | |
| 1567 | cg25248596 | CGGATATTGTTATATTATTCCACCCACCTTAATGCTGAGCCTTTAGGGGT | | | Mouse | | Human | |
| 1568 | cg25410668 | CACCGCGTGGAGTTGCTTGTTCTTTTACATAGGAGGTCACATTCTCTTCG | | | Mouse | | Human | |
| 1569 | cg25909521 | CGGATGTCATTATTCTTATAAACAACCTGTCAAAAGCCAAACAAAAGTGC | | | Mouse | | Human | |
| 1570 | cg26424339 | CGGACGAGCAGTTCACATTCCATTACGAAATTCTACACGGCTTCAGAGCC | | | Mouse | | Human | |
| 1571 | cg26426930 | CGGTGATTGAGCTTGTGCTCAATAAATATTCTTGCAGTATGCTCAAACGA | | | Mouse | | Human | |
| 1572 | cg26600422 | CGCAGAACCCTAGCTGTAATCACTAAACTTGATCTCATGGATGCGGGTAC | | | Mouse | | Human | |
| 1573 | cg26636682 | CGGTTTTTGTAAACTCTCTGGATATCATCGAGCTGACGTCATGCAGAAAA | | | Mouse | | Human | |
| 1574 | cg26637635 | AAACATTGTTTGCATTCTAGAACATGGAGAAATCTTTTCTCTCCATTGCG | | | Mouse | | Human | |
| 1575 | cg26650303 | ACATCTTTAGGGCCGCTCGGGTTAATATATGTCGTCAGAGGCTCCTCACG | | | Mouse | | Human | |
| 1576 | cg26821197 | CGACTGCTATGAACTGAAGCCACAGCCTAAACCAGGTAATATACCCTGAC | | | Mouse | | Human | |
| 1577 | cg27359471 | CGCCTACTAAATGCACAGTGCCATGTGCATAGGCGTTTATTTAATTACAT | | | Mouse | | Human | |
| 1578 | cg27702990 | AATTGTGCAAATGAACCTTTAAATCCGTAAATAGTGCCCCCACAATGCCG | | | Mouse | | Human | |
| 1579 | cg26709300 | CGGTGACAATCATCCAAGTAGGCCTGAAACGTCTTGGGCTTTGAAATCCG | | | Mouse | | | Universal |
| 1580 | cg11614630 | CGGGGAGACTGTTTAACTTCAGCGTTTCTATAGGAGCCTGTTGTAGTTTA | | | Mouse | | | Universal |
| 1581 | cg20766695 | CGCCCCGATGGAAATACACTGTAAGCACGACCCGTTTGCATCCATGCATA | | | Mouse | | | Universal |
| 1582 | cg07005811 | CGGAGGTCCTATCTGTGATTGGACAGTCTTTCTTTGCAAAGTGCTGGTGT | | | Mouse | | | Universal |
| 1583 | cg08666298 | CGTCATGTCGAGACCTGCCAGAGAGAGACACATTCTCAAGTGAATCCTGG | | | Mouse | | | Universal |
| 1584 | cg05506474 | ATAAAAATCTTCCCCAACAGTGTGAAGGTTCCCCAGCGGAAACACGTTCG | | | Mouse | | | Universal |
| 1585 | cg19614548 | CGCCCCAGCTTCAGCTCGATGTCTCTGAGGTCTGGCAGCGGGCTGTCTTC | | | Mouse | | | Universal |
| 1586 | cg01571965 | CGCAGCGACACTTGTGAGTACTGTGGGAAAGTCTTCAAGAACTGTAGCAA | | | Mouse | | | Universal |
| 1587 | cg26917960 | CGTGTGACATTTTTATTCATGGTGGCGTACGCCCTTGTAATGATCAGCTC | | | Mouse | | | Universal |
| 1588 | cg01038105 | GTCCGTTGAGTTTCAAATCTGAAAATTTCTGTCTTTCAAGGTCAGCATCG | | | Mouse | | | Universal |
| 1589 | cg21602520 | GTGTGTGGAGAGCGTCAACCGGGAGATGTCGCCCCTGGTGGACAACATCG | | | Mouse | | | Universal |
| 1590 | cg24024857 | GCGCTAATTGCTCCAGGGCGCTTTCCAAGTTCAAAAGTTCACCTTTTACG | | | Mouse | | | Universal |
| 1591 | cg05933505 | CGTCTGACGGCACAGGTGCCTTGGCTCGATGTTCCTCGTTACTAACGGCA | | | Mouse | | | Universal |
| 1592 | cg21278764 | CGGCACTAAGCAAGCAGTTGCCAGTTGTACTAAAATTACTACCAACTTAA | | | Mouse | | | Universal |
| 1593 | cg18281552 | CAAAAATGAAACCAATTAAGGACAAACTTTGAAAGCCTCTAATTGCTGCG | | | Mouse | | | Universal |
| 1594 | cg27435767 | GCAACATGCTGAAATATGGGGTACATTTTAAATATCTTCATTTAAAAACG | | | Mouse | | | Universal |
| 1595 | cg06156376 | CACTTTCTGGTCAAAAGACTTGGAGACGAACGCCGTAAGTTCTTCCATCG | | | Mouse | | | Universal |
| 1596 | cg23298936 | AACAAACAAAAGCTGCTTCTTGACAGGGAGTCATTTATATTTTAGCTTCG | | | Mouse | | | Universal |
| 1597 | cg19323953 | CGCATCTGAACTGGAAAGGGAGAAGACAGACTAAATGAAATCCCATCCAT | | | Mouse | | | Universal |
| 1598 | cg08563010 | TTCTGTTTCACTTGTTGGCAAACTTACATTTCAAAACAACAACAAAAACG | | | Mouse | | | Universal |
| 1599 | cg22267613 | CGTGACGCTTCTGTCGTAATCCAATCAGGTTACATAGGTCCTAAACAAGA | | | Mouse | | | Universal |
| 1600 | cg26425570 | AGTGCCTAGTAATTGGTACAAAGGCACTTTCTGTTTCTATGCAACACACG | | | Mouse | | | Universal |
| 1601 | cg07476673 | TGTTTAACTTCAGCGTTTCTATAGGAGCCTGTTGTAGTTTAACTCCTGCG | | | Mouse | | | Universal |
| 1602 | cg23207462 | CGCCTGTGATTGACAGCTGGAGTGGCAGAAAGCCATGAGATTTGGTAGTT | | | Mouse | | | Universal |
| 1603 | cg18918349 | ACTTAGCTTTTCCCCCAACTCCTGGCGGGGTCTGACGTCAGCCATGTGCG | | | Mouse | | | Universal |
| 1604 | cg00258262 | CGGGATAGTAGGTGTCCCAAAATGTCTTAATTCAGAGAATTAGTGTTAAC | | | Mouse | | | Universal |
| 1605 | cg00587168 | CGCAGAATTAGCCTGAATTGCATGGTAACTGCTGCTGCTTTAAAATTTTT | | | Mouse | | | Universal |
| 1606 | cg11438204 | ATTTAATCCAGTCTTTGAGCTCATCCACAGTGACAAACCCGTCCTTGTCG | | | Mouse | | | Universal |
| 1607 | cg12713245 | TGCTATGGGGCCAGTTTCCTCCTCTTGTTTTTGGCAGGACGGCCAGGGCG | | | Mouse | | | Universal |
| 1608 | cg22204849 | CGTGCTTGGGGGGTAATTCTATTGGGATATCCTTTCACTCTGCATGGTTG | | | Mouse | | | Universal |
| 1609 | cg06147321 | CGGGTTTACTATTTAGTGTAAAGAGTTCCGATTTGGGTATATTTAAGAAA | | | Mouse | | | Universal |
| 1610 | cg08849105 | CGACCCCAGCCACAGCGACAACCTGCTGCACGGCCTCAACCTGCTGTGGA | | | Mouse | | | Universal |
| 1611 | cg05967003 | CGGAAATTGCCTTCATTGGATTAAGCAGCAGCCTTGGACGCGGGTTCTGA | | | Mouse | | | Universal |
| 1612 | cg05535461 | CGGAACAACAAATGATAGCTAACTACAGAGGCACATTTGCAGTAGTCACA | | | Mouse | | | Universal |
| 1613 | cg15343536 | ATCAGCTATTAGTGCCTAATCATATGGTCTATCGATCATGAGATTAATCG | | | Mouse | | | Universal |
| 1614 | cg10183248 | CGGAGAAGCCGACTGCCCCACAGACCTGGAAATGGCCGCCCCCAAAGGCC | | | Mouse | | | Universal |
| 1615 | cg08026739 | AAGGGTTTCTAATCCTGGAAGGCTGTCTGACATCACCCCGTTTCTTGTCG | | | Mouse | | | Universal |
| 1616 | cg02766818 | GTAAAACTGAAAGTATCCCACGCCAGAGTGAAGCCCGCTTTTTGACAGCG | | | Mouse | | | Universal |
| 1617 | cg18024395 | CGCTCCCCTTACAACACCTCAGTGTATGGTTGGTATAAGGGTTTGTATCA | | | Mouse | | | Universal |
| 1618 | cg12338698 | ATGGTGAGAATAAACCACCACAGGCCATTGTGAAACCCCAAATCCTGACG | | | Mouse | | | Universal |
| 1619 | cg02692845 | CGCAGACCTACATGAACGGCTCGCCCACCTACAGCATGTCCTACTCGCAG | | | Mouse | | | Universal |
| 1620 | cg24787338 | CGCGTAGCAGCCATCTGGCATCCTTATCCCGTCCAGAGCCATGGCTCCTT | | | Mouse | | | Universal |
| 1621 | cg05750171 | ACGTGAGACTTCTTCTTGAACATCTTGCCACAAATGCTGCATTTATGGCG | | | Mouse | | | Universal |
| 1622 | cg24866378 | CTCTCAGACAAGACTTGAACCTATGACCTTCACTGTGTACACAATAGGCG | | | Mouse | | | Universal |
| 1623 | cg12981876 | AATTGTTTGGCAAATTCTTTGGCTTCCAGCGTGTCCCCCAGGCAGGAACG | | | Mouse | | | Universal |
| 1624 | cg20265593 | CGGGGGCCAGCGCTGCGGCTGGATTCCCATCCAGTACCCCATCATTTCCG | | | Mouse | | | Universal |
| 1625 | cg27698932 | ATTTAGACTGACTGTTTGCACTGCAGACTGCGGCCACTGGGTTCCCGGCG | | | Mouse | | | Universal |
| 1626 | cg15702573 | GGTTCCAGAGGATTGGGCCCACAGGGGTCATGCTCAGTACAAGACAGACG | | | Mouse | | | Universal |
| 1627 | cg08981150 | TGACCCTCTGCTGCTGGGCCATCAAAGTTTGGTGCATCTTCTGCCAATCG | | | Mouse | | | Universal |
| 1628 | cg24975211 | CGAGACGAAAAGGAAAAGCAAACCAGAATCTTATTTATATTGTTATAAAA | | | Mouse | | | Universal |
| 1629 | cg04567783 | CGGACAGTGATTAATGATAGCAGAGCAGAGGGGTTAACACACTTCACTGA | | | Mouse | | | |
| 1630 | cg11565438 | CGGAGGATTTCCCAAGCAGTTGTTGCACAGGTAACAGGTAAGAGCTGAAG | | | Mouse | | | |
| 1631 | cg19399365 | TTCCCTCTCCAACGGGAGCGGAAAATGTGATTTGCTGTGCATTCCAGGCG | | | Mouse | | | |
| 1632 | cg16062897 | CAGAGACTGAACCCTTGATATAATAATCTACAAAGAATGGTGTGTGATCG | | | Mouse | | | |
| 1633 | cg04290831 | CTCCTGTCCATGTAAACATTCCTCTGACTTTCTTCCCTAAAATATAAACG | | | Mouse | | | |
| 1634 | cg05977669 | CGGTGAGAACACCGAGTGACGATCTGTTGCTTCCCCTGAGGTGGCTACAA | | | Mouse | | | |
| 1635 | cg24444575 | CGCGGATGGATGCTGCGGGAAGGGGCTGCCATTTGCTGCCCCTGCCAGCG | | | Mouse | | | |
| 1636 | cg13721678 | CGGGCACAGTACTCATCTAACACAAAGACTTGGCCAGGGCTAAACCATCC | | | Mouse | | | |
| 1637 | cg26834803 | AGCAGATCCACCACGGGGAGCCCACCGACTTTATTAACCTGCACAATGCG | | | Mouse | | | |
| 1638 | cg10859648 | TCATTTTGTGTGTAAATGAGCGTGGCATTCTGCTCACTTCTCTCTGCTCG | | | Mouse | | | |
| 1639 | cg00264615 | CGCAGCTGCCTTGAGGTTGTTTATTTCCCAGCGTTTTCTCAAGACTCCTG | | | Mouse | | | |
| 1640 | cg27050612 | GAGAGGAAAATCCCTGCATTTCCAACCACCTGATGCAACCAATGACAACG | | | Mouse | | | |
| 1641 | cg14817774 | CCTAGCTTCACCTTATTCTTTAAAGGGCAGAAAATTTGAGACGGTGATCG | | | Mouse | | | |
| 1642 | cg23394633 | CGCCCCTAACCACTGGGTCATCATTTATTCACAGGCCTGAAGTCCCTTAA | | | Mouse | | | |
| 1643 | cg04724146 | ACAAAAAGGAATTTACTGCAATTCCTTGCGGATTTTGCACATACAGCTCG | | | Mouse | | | |
| 1644 | cg16861303 | CCTTCCTACCTGAGGTGAACAGGACTATGGCCTTGAGGCAGCTGTACTCG | | | Mouse | | | |
| 1645 | cg15601638 | CGCTATCTCATGGACACAGGTACGGTGCCCAATTACACTGTAAACAGTTT | | | Mouse | | | |
| 1646 | cg23629098 | CGCTCCCTGCCAAATTGATTCAAATTGGCTTGGATATGAACATATGATTA | | | Mouse | | | |
| 1647 | cg12959926 | CGGTGGTCATGACCTACAGTATCACCTGCCCCATCATCGTGCCCTTCGGT | | | Mouse | | | |
| 1648 | cg09289224 | AGGACCTGGAAAGGAATGACGGCTCTCAGGAGCGACCCTACTTCATGTCG | | | Mouse | | | |
| 1649 | cg27496468 | TGCCTATAGAGCCACCAGTGACCCGTCAAAAAGAGTAGCATGGGAATTCG | | | Mouse | | | |
| 1650 | cg21082139 | ACAATGCTGCTGCGTCACCCACATGCAGCTCCCAGAAATGCTTTGCAACG | | | Mouse | | | |
| 1651 | cg16677609 | CGACCTTTGGGGCCTGGTGGTTGTTAATGCATGAGTGACTGCCTGCATTG | | | Mouse | | | |
| 1652 | cg16023341 | CGCCCGGCTCAGCTGCACTATTTAGGAGATGAGGTTTGTCAATTTCTATT | | | Mouse | | | |
| 1653 | cg17466220 | CGCTTTGTGGCCACGCTGGATATTAGTAGATGAGGATCATTCTGCTTCAA | | | Mouse | | | |
| 1654 | cg14800351 | GAAAAGTCTGTTGACTGGGCTTCTTGTAACACAATGTGGCCCGCTGCACG | | | Mouse | | | |
| 1655 | cg02806971 | CGCTTCGCGCACCCACCCCTGCCGAGGAGCCTACTTGCTGCAGCCCAATG | | | Mouse | | | |
| 1656 | cg24119607 | CGCCTCCCAGACCTCTGGGGCCATGAATCATTTATGAGGCAAAAATGAAA | | | Mouse | | | |
| 1657 | cg03380023 | GAAGTAGATAGCTCTATGCATCATTAATGAAATTTTTTAACACTTAAACG | | | Mouse | | | |
| 1658 | cg15052029 | CGTCAGACAAGTGCACTCAACAGAACGGCCCTTCAAATGTGAGGTAGGAA | | | Mouse | | | |
| 1659 | cg02758132 | CCTTAAGGAGTACCAGGCCAAGGTGACGCCCACGGGGCCCTGCAGCTACG | | | Mouse | | | |
| 1660 | cg21403130 | TTATAGTCAGTGGGTTGTTTGCGACCTTCTTAGCATACGCATCCAATTCG | | | Mouse | | | |
| 1661 | cg21872209 | CAATTACCATAAAAATATCTTTCTTTAAAATCCTGACCCAAAACACAACG | | | Mouse | | | |
| 1662 | cg02269624 | CGCATTGATTTAACACATCTTGTTTTCAATCATGCTTGGATTTTCTGAGC | | | Mouse | | | |
| 1663 | cg26300812 | GCTGCATTAAATTGTAAAATCGATTTATTGACCGGCAGGTGCGAGCAGCG | | | Mouse | | | |
| 1664 | cg11327853 | CGAGGAGGCTGAACACTGCATGAAGAGAGGACCGAGCCAATGAGAGAACA | | | Mouse | | | |
| 1665 | cg19327615 | TGCGTCAGCTCTGCCTTATAAATGGAGTGCATTCTATCAAAACCAGGACG | | | Mouse | | | |
| 1666 | cg16171324 | CGAAGATAATTGTTTCATCCACTTTGTCAAAGCTGAAATGAAAAGAGGGC | | | Mouse | | | |
| 1667 | cg08078389 | ATGCCACCTTTGGTTATTAACATGTCTCTCTCTACTTTTATGATTTTTCG | | | Mouse | | | |
| 1668 | cg27217092 | GCTCTCTCTGGGGACTTCCATGCAGGACATCCCCGGATTAGGTGACGACG | | | Mouse | | | |
| 1669 | cg03139948 | AGGACCCTTGATCTTCGGTGGGCAGTAGGAATCAAGGACCCTCAAATTCG | | | Mouse | | | |
| 1670 | cg10583293 | TAATTAGAAATGCTTTTCATATCTTCTCTGTGCAAGGGCTTAATCTGACG | | | Mouse | | | |
| 1671 | cg19356917 | CAGCGGCACACAGAGTCCCAGCCAATAACTGCACGAAGAATGAGCTAGCG | | | Mouse | | | |
| 1672 | cg07451598 | TAATTGCAATGAGGCCCTCTAGGCCGTGAATTAATGTGTCATAACTCACG | | | Mouse | | | |
| 1673 | cg19696052 | GGGGCTGTTGAGACTTTCTGGCATGGTGGTCATGGTCATCTCTTCTCGCG | | | Mouse | | | |
| 1674 | cg11717789 | TCTAGCCCAGAAGATGTCCAGGCTTTGGTGAGCGGGAAGCTTGCACTTCG | | | Mouse | | | |
| 1675 | cg13550191 | CGGCTGTCTCTAGTGTGTTATTGTTAGTGTTACATTACAAATCCCGTTTC | | | Mouse | | | |
| 1676 | cg21634324 | CGCCTGCCAGGCAGAGACAGATGGAGAGCTGACACTCCGGATTGCACTTG | | | Mouse | | | |
| 1677 | cg12880255 | GAAGAGCAGCAGCGGCAGCACGAAGGTGCAGAGCGCACTGGCCAGCAGCG | | | Mouse | | | |
| 1678 | cg11134207 | CGGGTTTTAGGCAAGCCAGGTGCATTCTGGATGTAGTCTGGTGTGGCAAT | | | Mouse | | | |
| 1679 | cg17946107 | CGGATTAGCAGTATGAAAGAAAGACACACAATAAGCTGGAATTGTTTTAC | | | Mouse | | | |
| 1680 | cg18834375 | CCAGACGCTTACTATGCAGTGTAAGCTCAGTTGGTTTACTAATCACCCCG | | | Mouse | | | |
| 1681 | cg11260565 | GGTTTCTGAACATAATAAAATCTTTGGCTTGTAGCGGCGGTTCAGTCTCG | | | Mouse | | | |
| 1682 | cg22123640 | ATCTACTTCGCCTCATTTGGTTACTAATTGGTTTCTTGTTTTATAAATCG | | | Mouse | | | |
| 1683 | cg14580567 | CACAGCCTCTCATGTTTCGTTCCCTCTTTTCTTCTTCTTTTTAACTAGCG | | | Mouse | | | |
| 1684 | cg25133549 | TTCATACCTGATGGAGCCTGCATCTGAGGATGATTCATTGTGCTCACACG | | | Mouse | | | |
| 1685 | cg17675822 | CGCCATGGAGAAATCTTGGTAATGACCCATTCCCCGTAAGCATCCCAGGA | | | Mouse | | | |
| 1686 | cg13651176 | CGCGTACATCACAGTAAGTTGTCTATTGATTTTCCTGAATGAAAATGGTC | | | Mouse | | | |
| 1687 | cg22561517 | CGCTGTAATAAGCAGTTATTATGTATGTGTAAAAATAATGAGAGGCCGTG | | | Mouse | | | |
| 1688 | cg11157816 | CGGGACCCCTCCAAGGACAGCAGCACCACCTTGTGGAGTACATGGAACGC | | | Mouse | | | |
| 1689 | cg00225449 | CGCAATCCAATCCATTCGGAGTTGAGCCTAGGATAGGAGGGGAAAGTCTA | | | Mouse | | | |
| 1690 | cg15051314 | TTGGTGTGCAGGGAGCCGCTGAACTGCATGTACTGCACCAGGTAGGAGCG | | | Mouse | | | |
| 1691 | cg22311716 | CGAAGGTGCTAAGGCCCAGAAGCTCAAAGGAGATACACATGTGGCCATGG | | | Mouse | | | |
| 1692 | cg22149945 | TTCTCTGCAGGACTGTGTGTTCAGCAAGGAAGCAGGACGCATGTGCTACG | | | Mouse | | | |
| 1693 | cg21740009 | CGTCAGGGTATCTGAGTTTCACAGAACAGACGGGGTGAGAGTTTTTGTGC | | | Mouse | | | |
| 1694 | cg01513560 | CGTCACTTGAACATGTGCCGTCCAGAGCTGGCCCTGTTCTAGCCGTCACA | | | Mouse | | | |
| 1695 | cg01701526 | CCTCCAGGAGCCAGAATCCAATTTCAGAAACCACAAAATCAACATAAACG | | | Mouse | | | |
| 1696 | cg27303748 | TGCATACCTGCAACACTTATGCTACCGCAATGACAAGGTGAAGACTGACG | | | Mouse | | | |
| 1697 | cg27186131 | TTTTTTCCCACAGGATTAGATCTGGGCAGGATTCATATTCATAACCCACG | | | Mouse | | | |
| 1698 | cg15069444 | CGGGCGCCAGCTTCCACAGCAGCAACTGTTGCTATGGAGACCAGGCTCCA | | | Mouse | | | |
| 1699 | cg06315860 | CGCCCCCGTCCACGGCCACGGAAGGAAGCCCGCGCCCCACCAGCCCCATC | | | Mouse | | | |
| 1700 | cg16331496 | AACACGTGGACTCTATAATCAACAAGCGGCTCTCAAAGTCCTCTGCCACG | | | Mouse | | | |
| 1701 | cg16976603 | CGCGTCAGGTGGTGGCGATGACTTAATTCCTAGCCCAAGAAGAATATAAT | | | Mouse | | | |
| 1702 | cg16018837 | CGCACACCTGCAGCAGGGACTTGACACTGGGCTGGAAGACCATGTTGGTG | | | Mouse | | | |
| 1703 | cg24831901 | CGGCTCCCGTTCTGCAGCAGCTCCTCAAACTGGATGGTGCAGTTGGCCAC | | | Mouse | | | |
| 1704 | cg13834844 | AAACTTCTATTAGTAATGGAGACCTCGCCGGAGACCTTCCGCGGAGAGCG | | | Mouse | | | |
| 1705 | cg08809534 | CGCAGAGCGAAAGCGTTTACAGACCTGAAAATTGTTGTTGAAGGCAGAGA | | | Mouse | | | |
| 1706 | cg03724931 | CGATCATTTCCTCACTTGTTTAAATAGTGCAGCTTGTGTTGGCAGTGCTC | | | Mouse | | | |
| 1707 | cg07898297 | CGGCGAGGGCCTCACCGAGGGCATGGACAAGCTCTATGAGATGATCCTGA | | | Mouse | | | |
| 1708 | cg14371358 | GTGCAGCAAACAAAAAGTGTGTGTCTGCGTGCCAGTCAGTCACTGCATCG | | | Mouse | | | |
| 1709 | cg17273372 | CGGGTTTGTCTTTAACCTCCAAACAGGGAACTTTAATTAAAGAGACAGTG | | | Mouse | | | |
| 1710 | cg09571697 | TAAACAAAACAGAAGGTTGTAACTGTCATAATTTGCATTGCACTTTCACG | | | Mouse | | | |
| 1711 | cg19703390 | CGGAAACCGCCCCCCGGCTGCTCCGATTCCCCTGGAGTGTGAAGCTGACC | | | Mouse | | | |
| 1712 | cg07230616 | AAGAGCACAGCAGTCCTACAAGTCCTTGGTGCAGATCCACGAAAAAAACG | | | Mouse | | | |
| 1713 | cg19834403 | CGGGATCTGTCTTTCACTTAGACTTAATTAAGAAACTTGCTGGCTTTGTC | | | Mouse | | | |
| 1714 | cg11218107 | GGGGCAGCCGTGGGCTTAGTCTTTGCCTTCCTCCTGGCCCTGACCACACG | | | Mouse | | | |
| 1715 | cg26352306 | TTCTGTATGTTTTTCCTTTAAAACCAAGAGCTGGGCAGGCATCCCATTCG | | | Mouse | | | |
| 1716 | cg21032275 | CGCCAGTCTGATGCCAGGACTGAATAAAGTGTATTTGCCCCGACCTTGCC | | | Mouse | | | |
| 1717 | cg12790413 | CTGATCTGTCAGACATTGATTATCATGAGCAGCTGTTGTTGGGTAGAACG | | | Mouse | | | |
| 1718 | cg04908805 | CGCCCTTAGATAAATAATTACACTCTTAAGCTGTGTCGAGTGCTGATACA | | | Mouse | | | |
| 1719 | cg13000461 | CGGGGGCCAGCTGTCCCAGTGGGGGTCATGTAGCCGATATTTATCTTGCA | | | Mouse | | | |
| 1720 | cg11464058 | AATCTGTAGATTCCCACAGCGCGTTTATATCCTCACTAGAGTGAGCTCCG | | | Mouse | | | |
| 1721 | cg26422625 | CGCTAAAGACCCCCTGACTTCCAGCAAGTCCACATTAAACATGTGACATG | | | Mouse | | | |
| 1722 | cg08230071 | AAGAGACTTGACTTTAAGAGACTCCTGTACTGACAACTCCATGCAGTTCG | | | Mouse | | | |
| 1723 | cg06545110 | TGTGCATTTAATGAAACCGTCTGGCTGTGATACCATCAGCTCCAAGCTCG | | | Mouse | | | |
| 1724 | cg07211487 | CGTTCAAGGCTAACACCTGAGCTTTGTGTAATGTAAATAAGACCTTGTGT | | | Mouse | | | |
| 1725 | cg06006726 | CATGAGGAATAGCATCTTCCAACTCATGATACACACCCTTGACCCACTCG | | | Mouse | | | |
| 1726 | cg08873407 | TTTAACTAGTGATTACAGACCGGCAACCTTCTAGCCCTGAATGTCAAACG | | | Mouse | | | |
| 1727 | cg24083274 | ATGGTCTGCTGCCCACCTAATTTTGCCTTATTGTCAGTCACTACTTACCG | | | Mouse | | | |
| 1728 | cg15936060 | CCATTATCTAGTTTCTCCTGCCTCCAGGCAGGGCCACATCATTGATTACG | | | Mouse | | | |
| 1729 | cg07966323 | CGGGTCACAGATTGAATCAATTGTCCAATCTTGTGAAAGTCATATCCTTG | | | Mouse | | | |
| 1730 | cg02785457 | TAATTATCCGTCTCATTTGAGAAGAGCAGCATTTGAGGCAGCAGCGTTCG | | | Mouse | | | |
| 1731 | cg08707617 | TTCAGGGCTTAATTACTCCTCCTTGATCCATGGGACTAGACACGACACCG | | | Mouse | | | |
| 1732 | cg17295628 | CGGGGAAATCCAATACGCTGAAAGGTTAATGCAATCAATTAGGGTGACAA | | | Mouse | | | |
| 1733 | cg08955338 | TATACATGTTCAAATAATTGCTCATCCTAATGTGCAGTGATCTGTATTCG | | | Mouse | | | |
| 1734 | cg04846076 | TCACTTTCACAACCCAGAACAAAAATCTCGCTAGATATGGCCTCAGACCG | | | Mouse | | | |
| 1735 | cg12247042 | CGGCCCTTCAGTGGCTTTGACCCAGATGACATGGATGTGGATGAAGATGA | | | Mouse | | | |
| 1736 | cg10270480 | TAGCTGAATGCCTCTCACAACCACGGGGGGAAGTCTGGAAGAAATCACCG | | | Mouse | | | |
| 1737 | cg01537787 | AGGCATCGATAGGCGGTGTAGGCAGCCTTCATTCAGTCCATCAGGGCCCG | | | Mouse | | | |
| 1738 | cg11226818 | CGCCTCCAGTTGAGGAGGCTGGGAGCCGCCATCTTCCCAACCCCCGCCCC | | | Mouse | | | |
| 1739 | cg02391262 | CGGGCCTGGAGCTGCCCGCAGCACAACGCCTACCGCCTCTACCACTGCGA | | | Mouse | | | |
| 1740 | cg05234920 | CGAGCCAATTAGACTTGTCAGACTCCAATCCAGTTGAGAGTGACCCCTGA | | | Mouse | | | |
| 1741 | cg10763467 | CGATGCATATGTTTAGAATAATGTTTCATTTAGCTGACTGCGAGTAATGC | | | Mouse | | | |
| 1742 | cg18961523 | TAAACAGGACTCCGTAAACATACTGACGAACTGGCCTATAGAGCAGAGCG | | | Mouse | | | |
| 1743 | cg22749775 | CGGAGACGTGATATGTCATATGATTAGCATCTTTCATATTTACAAGAGTG | | | Mouse | | | |
| 1744 | cg26925489 | CGGCTTCCCTAGAAGAACGGGCGGAGAGAGTTTTTTATGGCCCCATAAAA | | | Mouse | | | |
| 1745 | cg12121354 | GGGCTCCCTGTTCTTTCGCACCAGGCTGACAAATGTGTCAATCTCTGCCG | | | Mouse | | | |
| 1746 | cg02925207 | CGCATAAATCCAGATGACATAGATTTAGAAAATGAGCCCTGGTATAAATT | | | Mouse | | | |
| 1747 | cg12175065 | CGCACCGTTTATCTTGCTTGGATTCACCTTCAAGAGATTTCCGGACCCAT | | | Mouse | | | |
| 1748 | cg09201244 | CGCCAAGCTCTGTCCCCCAGGGCCGCCAGGTTGATGCTGATACCAAGGCT | | | Mouse | | | |
| 1749 | cg20463887 | TGATTTCTCTTTCTTCTTTGGAAATTTCATTGAGATGTCTCTGTACTTCG | | | Mouse | | | |
| 1750 | cg13369768 | AAACAAGGTTGGTATGGGCCCAACACAAACGCCCATATCGATGAGTCACG | | | Mouse | | | |
| 1751 | cg21016222 | CGTCAACCACCGCAAACACAACATTCCGCACTTCTGGCCCAAGCTGCTGA | | | Mouse | | | |
| 1752 | cg20916188 | ACATCTGGAACCAGTTGCAATACATCACTGTCAAAACTGCTTTCTATACG | | | Mouse | | | |
| 1753 | cg04342828 | CGCCGCCCAGGTGTTCCCCTGCAAGTACTGCCCGGCCACCTTCTACAGCT | | | Mouse | | | |
| 1754 | cg13125030 | CGGAGGGTCGCCAGGAAAGTGGACATTACCGCTTTAATTAACTTCGAGAT | | | Mouse | | | |
| 1755 | cg11341452 | CGGAGCAGGAAGACTGTTACTTACGTCGCCTGAGGGAAACCCACCGTCCA | | | Mouse | | | |
| 1756 | cg13636207 | GATTATTAAAAAGTTCATTTCCTGGCGAATCGGGTGACGTCAGGGGCTCG | | | Mouse | | | |
| 1757 | cg05166871 | CAGGCCTTTCAAACACCTTTTCCCTGCTCTATTCAAACTTGAATTCTGCG | | | Mouse | | | |
| 1758 | cg08001107 | CGCTTGGTTAATTCAGAGTAACAGATCTGCCCCCAAGTGAATTGGAGGCC | | | Mouse | | | |
| 1759 | cg16170739 | CGCTGTGTAGGGAGAAAAGATGTTGCAGTAGGTACTGGCGATCTACAGGA | | | Mouse | | | |
| 1760 | cg14431257 | AAAATGGATCAACCCTGGTGTGTAGCTAGCAAGCAATAACTGACTACTCG | | | Mouse | | | |
| 1761 | cg21752606 | CGGCCAACCTTACTGCACCCTTCAGCGTCCGGAGCTGGGCAACCATGTCC | | | Mouse | | | |
| 1762 | cg14398903 | TTTGTAAACTCCTAGGACGAGTGCCTTGCTTGAACCAAAGTGTTAAACCG | | | Mouse | | | |
| 1763 | cg15431157 | CGGTAACAGAATATGATGGAGGGCACACTGTTTCCTTAACTGCTTCTCAA | | | Mouse | | | |
| 1764 | cg14854610 | AGCTTGCCACAGTATGAAGTCCAGTTTGGGCTATATTCCCTTCCCTCTCG | | | Mouse | | | |
| 1765 | cg14732096 | AAACTTAAGAGCGACAGAACAAGGAACAGGCAGAGACTGCAAAGCCCTCG | | | Mouse | | | |
| 1766 | cg09522001 | CGTCAGAATCCTCACTGCTGCTGGGAAGGCGACCTCGTTTCATGATCTCC | | | Mouse | | | |
| 1767 | cg23443820 | CTGCCTTTGGTCACGTCGAAGACTTTCCCATTGACCGCGAGCAGGATGCG | | | Mouse | | | |
| 1768 | cg07219448 | CGTCCAGTAATTAATTTTCCTGCTGCCGGGGGGTGGTGGTTTTGACACAT | | | Mouse | | | |
| 1769 | cg15338129 | TTGCATGGGGACCCCCTGCTCACTCAGGACTTTCAGAGGAGACGCCTGCG | | | Mouse | | | |
| 1770 | cg07428697 | GTGCGGGGAGAACTGGTGCTTGAGGCTGCAGAGGAAGCTCCAGAGCTCCG | | | Mouse | | | |
| 1771 | cg20402664 | CTTTGGGGGGCAGCCCTGTCAGATTGGCCAGGTGGAAGATGTCGGCATCG | | | Mouse | | | |
| 1772 | cg19204561 | CGTGACATGAACTTTGTGTGTAAGAGTGGGTTCATTGAATTAAAAAAAAG | | | Mouse | | | |
| 1773 | cg02236977 | TATTACAGCTGACAAGAGGGTGATGATATTAGCCCATCATCATTCAGACG | | | Mouse | | | |
| 1774 | cg16555117 | TTGTACAAGATCCGCAGACGTGTAAATGTTCCTGCAAAAACACAGACTCG | | | Mouse | | | |
| 1775 | cg02339457 | CGGGCAGTAGTTTGTCACCAATTCCAAATGGCCAATCGTTAATACTAATG | | | Mouse | | | |
| 1776 | cg20665157.1 | TGTCAATAGAAATTGACAAACCTCATCTCCTAAATAGTGCAGCTGAGCCG | | | Mouse | | | |
| 1777 | cg08284222 | GACCATCATCTCAGGATGTCTCTTTCTGGCCGCCGATATCTTCGCCATCG | | | Mouse | | | |
| 1778 | cg01359371 | CGCCCTTCAGTGGCTGCATGTTCTCCAGCTGCTCCAGGAGGGGCCCGATG | | | Mouse | | | |
| 1779 | cg17185663 | CCGGACCATGTGCTCGGCGTGAGACAAAAGCAACAACAAAGGAAGTGGCG | | | Mouse | | | |
| 1780 | cg24959302 | TGAACAGTTGGATTCTTTTATTTCTTACAAGTGCTGGATTCGCCTTATCG | | | Mouse | | | |
| 1781 | cg19705440 | CGGCAGTTTTCGTCAGTTAATTAGGTTTAATTTACATAATTAGTACAGTA | | | Mouse | | | |
| 1782 | cg18278920 | CGGCTTACCAGGAAACGATGATGTGGCAACAATGCCATCTGGAGGCAAAG | | | Mouse | | | |
| 1783 | cg09802644 | CCTGAAGCGGAAACTGACAAATTCTGTTTAACAAAGACATTTGTCCCTCG | | | Mouse | | | |
| 1784 | cg03523182 | CGCCTTCCCAGCAGCAGTGAGGATTCTGACGACAATGGCAGTAAGTCCTG | | | Mouse | | | |
| 1785 | cg19046398 | CGGCCGCTGCCCAGGCGGAAGCCCTTGGAGCGCACCCAGAACTGGAACTT | | | Mouse | | | |
| 1786 | cg10456584 | CTCCAGCATGACCAGGCAAATCTGCTTGACACACTCGGTGACAGACTGCG | | | Mouse | | | |
| 1787 | cg17784271 | CAGATTTTCTTGAGTGAGCAAATCTGCCTGGCTTTTACACCTAGAAATCG | | | Mouse | | | |
| 1788 | cg00017571 | CATAACGGATGCATTTGCAGATTTGGAAAATTAAAGCCATCTATATGGCG | | | Mouse | | | |
| 1789 | cg07775532 | GAGCATCCTGTCTTCTGCTTGGCCTCCCAAGTGATGGATTTAACCATTCG | | | Mouse | | | |
| 1790 | cg11668811 | CGTCAAATGGCTCAGAAGGCAAAGTTTGGCTGCAAGGGCTATGGCCGTGG | | | Mouse | | | |
| 1791 | cg11311195 | CTCACCTGGGGGCAGCTGGAAGTTCTGGATGTTGGTCGGGTTCTGAGGCG | | | Mouse | | | |
| 1792 | cg11437639 | GCAATGTACTTCAGAAATAGGGTCCTGTTCATTCTTTGCTTTACAAATCG | | | Mouse | | | |
| 1793 | cg11477279 | GCATTATGTTTTGTCTGTAACAGCTGCTGTTTTATCTTTATTTCCTCTCG | | | Mouse | | | |
| 1794 | cg08509859 | CGGGCCTCCAAGATGATGTCTTGAAATGTACAGCCGTTGGAGGGCAAGGA | | | Mouse | | | |
| 1795 | cg20002283 | CGCGGCTCCTTTAAGAGCCCGGCTTTGCCTCCCGGTAGCTGAAGGTCATT | | | Mouse | | | |
| 1796 | cg22351850 | GTGTTCTCCAGCTGTTCCCGAGTAAAGAACCAGCGAGAAGAAGCTCCACG | | | Mouse | | | |
| 1797 | cg20426932 | TTGTCGAGCCTGAATATGCTGCTGTCAGACTCGCTTAATGAAAAGTAACG | | | Mouse | | | |
| 1798 | cg07221240 | GTTTCCTCAGGAGCTGGCGCAGAAAATTAAGGGCTACCAGGAGCAGATCG | | | Mouse | | | |
| 1799 | cg21159131 | CTCATGCATGCTGACCTGGAAATCCTCCTTTGCCTTAGCTGCGATAATCG | | | Mouse | | | |
| 1800 | cg15981030 | AACAGGGGGGAGGGGTAACAAACCAGCTCTCGTCCATCAAGGAGGGCGCG | | | Mouse | | | |
| 1801 | cg18131863 | CGATCCGTCAGTAATGGTGCATGTCGGGACCCTGGCGCCTCTGACAAGTC | | | Mouse | | | |
| 1802 | cg21667796 | TTGGAGGCTGCTCATGCCCCCCTTGAAGTCGTTTTAAAAATAAAACCTCG | | | Mouse | | | |
| 1803 | cg10437383 | CGCAAACATTGCGGTTTGGTTTGATTTAGTCTAACTCTTGTGTAATAACT | | | Mouse | | | |
| 1804 | cg17095500 | ATAAGAGTCTTTCCACTTCAATCTTCGAAGGTGGCTACAAAGCACATGCG | | | Mouse | | | |
| 1805 | cg13068696 | ACAGCTCGACCGTCATCTGTAAAAAATGTCTCAGTGAGAGATAATCATCG | | | Mouse | | | |
| 1806 | cg21153937 | GATGCTCCTTTCCCGGTAACTCGCCCTCTCAGGCAAACCTGAAGATAGCG | | | Mouse | | | |
| 1807 | cg13467605 | CGGAGCTCCAGCTGTTGTGGGAAGAGAGGACCAGCCGGCAACTTTTATCC | | | Mouse | | | |
| 1808 | cg21473019 | GTGCCTTGTCTTCTTATTCCATCCATGAATAGAAACGCTATCAGTCAACG | | | Mouse | | | |
| 1809 | cg11647864 | CGACCAGGTGTTTCCATTGTCTCTGGTAATACAGTGTTGGCCGCCAAGGT | | | Mouse | | | |
| 1810 | cg27589919 | TGGATCGCCAAATGGTCAGTGAGCTGTAAAATGTGCAACCCTCCTCCCCG | | | Mouse | | | |
| 1811 | cg13725272 | CGGCCCCTTTAAGCAGATACAAAGGCTCGGCTTGTTTTGTTACAGTTCAT | | | Mouse | | | |
| 1812 | cg13856487 | CGTAACATCTGCTTAATCGTACGGATCAAAATATGGAGACACAAAACATA | | | Mouse | | | |
| 1813 | cg19362114 | CGGGCCGCAGTTAAGGTGACGAGATGCAGCAATTCTTTATGAACATTTCA | | | Mouse | | | |
| 1814 | cg18772588 | TGATTTAATGTCTATACAATTAAGGCACGCGGTGAATGCCAAGAGAGGCG | | | Mouse | | | |
| 1815 | cg18123948 | CCTCAGACAGGTCTAAAGGTTAATAGAGCAATCACAGGGCCCTATTACCG | | | Mouse | | | |
| 1816 | cg18334881 | TGGGATTAATTACCACGTTCTGGTCCCTCAGACTGGAGTATTACTTATCG | | | Mouse | | | |
| 1817 | cg20119248 | CCAAAGAGCTCCACGGGACATCCATTGTGCCCAAGCTGCAGGCCATCACG | | | Mouse | | | |
| 1818 | cg18406787 | CGGAGCAGAAAATTACTAATAGAAGAGAGATAATGAATAGGCCGGCCAGG | | | Mouse | | | |
| 1819 | cg14705099 | CTGTGGCAGGGGTCTCGGAAACCATGGGTTATTGCAGTGGCAGGTGCACG | | | Mouse | | | |
| 1820 | cg17170462 | GCTCAGAGGCTCCAGCAGGGGCCAGAGCTTCAAAGTCAGAGAAAATCACG | | | Mouse | | | |
| 1821 | cg14924324 | AAGGAGACGTAGGGGGCTCCCCAGGGCCAGCGGGGCTGGTAACTGACACG | | | Mouse | | | |
| 1822 | cg00597719 | ACATGCATCAGCTGTTGGGCTTTTGTTACGGGTATTGTAGAACTAATCCG | | | Mouse | | | |
| 1823 | cg23564550 | AAGAGTGAGCCAAGGCAGTAAAATGTAGCTGAATGCCTCTCACAACCACG | | | Mouse | | | |
| 1824 | cg23627350 | AGGTGTGACTGCCATGCCTTGGGCTCCACCAATGGGCAGTGTGACATCCG | | | Mouse | | | |
| 1825 | cg01753578 | CGCGCTCCCTGCAAAGCAGCTCTCATTATCCCGGAAGTTGTGCTGACACA | | | Mouse | | | |
| 1826 | cg15710854 | CGTAGTAAATATTTGATACTGTTAAATATTTCACCAGTTTTATGGGGCCT | | | Mouse | | | |
| 1827 | cg25770163 | CGGCTCCGGCGCGAGTTGCCTCTCCGCTTCACGCTCGATTTCCAGGCATT | | | Mouse | | | |
| 1828 | cg24293580 | TAATGACCTTGAATCCCCAGCTGTTGGGAGGTGTCCTGAACTCGGCATCG | | | Mouse | | | |
| 1829 | cg02860346 | AGCAGCGGGAGCAGATTCGGGCAATTACAATCAAGTCAGGGCACACGCCG | | | Mouse | | | |
| 1830 | cg24184266 | GCTAATGGCCATGCATTATTCACCAGCCTAATTGCTCAGCCCCATGCGCG | | | Mouse | | | |
| 1831 | cg16960148 | CGTCAGGAAAGGCACTTCTTAGTACCAACCTGTAGAAAAAAGAGATAGGT | | | Mouse | | | |
| 1832 | cg27205180 | TCCCCAGTGCTTGTCATTTCCTGACATGCCTGACAGGATGGGGACAGCCG | | | Mouse | | | |
| 1833 | cg16625559 | CGATTGCTGGGGCCACAGTGTTGGTACTCTTATTTTGCTGTGCCACCTTT | | | Mouse | | | |
| 1834 | cg10587356 | CGCTCCTTCAGCTGGTGATCCACCTCAGGACCAAAGGCAAAATTATTCAC | | | Mouse | | | |
| 1835 | cg04099562 | CGTGACTGTTTGGAACCTACACCATAGTAAATTTGCTATTTTTAGTATAG | | | Mouse | | | |
| 1836 | cg16986847 | CGGACCACACCAATCCGTCTGCTGGTTGAGGCCAAAGCGAGCACGGCATT | | | Mouse | | | |
| 1837 | cg24226527 | TGAATCGGAGGTACTAAAAATACCCCCGCGACAGCCTGAGGAAGCTGTCG | | | Mouse | | | |
| 1838 | cg04802034 | GGTCACAATGCTTACACTGTATGCAGCAAACACCCTTACAAGTCTATCCG | | | Mouse | | | |
| 1839 | cg10198934 | TCACCGAGCTGGGGCCAACCCAGAAGTTCTCCTGCTGGATGTACTTCACG | | | Mouse | | | |
| 1840 | cg09585004 | CCACCACCTGCAAATACCCCAGGAAAAGCAGTTGGAAACAATAAAACACG | | | Mouse | | | |
| 1841 | cg12084468 | CGGCAAGACTAATTGCCATGCGCTTCCGCTTTGAAACTGGCAGCAGACAG | | | Mouse | | | |
| 1842 | cg03900224 | GTTCCATGCCCCAGCGGACTCCCATTAGGGTCTGCATCTCCTTGGTAACG | | | Mouse | | | |
| 1843 | cg04532288 | CTCATGTTTAGTAATTCAGACCTTTAATAACAGCCACTCACAGCCCAACG | | | Mouse | | | |
| 1844 | cg14603973 | CGGGCCCGAGCCCCTGTCCCACTTCGAAGTGGAGGTCTGCCAGCTGCCCC | | | Mouse | | | |
| 1845 | cg20231144 | CTTAGCCCATTGGGCCAAAGCACTGTCTTGGAGGTGACAAAGATGTCTCG | | | Mouse | | | |
| 1846 | cg15889617 | CGGAGACTCAACATCCTGGAGGACCCCAGACTCAGGCCCTGCGAGTACAA | | | Mouse | | | |
| 1847 | cg27702216 | CAAAGGGCAATATTCACAGTTTATCTCAGGGTGATGGATCTGAATGGACG | | | Mouse | | | |
| 1848 | cg19092999 | CTACCTTTAAGAATATTTCCTGTTTCTTCAACCCAACTTGCACACCTCCG | | | Mouse | | | |
| 1849 | cg20847714 | AGGGACAGGATATCACTCTTCTCCTTCTCTGGCTGGGCGAGCAGTTTGCG | | | Mouse | | | |
| 1850 | cg23402580 | CGGGAGAATAAGGCCATGCCCTGCCAGGTGTGCAAGAAAGTTCTAGAGCC | | | Mouse | | | |
| 1851 | cg24576158 | CGGATGAATAATATATGCATTTATGCAGAGGTAATTGCCTTAGCCAGGTT | | | Mouse | | | |
| 1852 | cg01675972 | CGGCAAAGTGGCCAGCAACAGAGTCCTGATCCAAATGGAGAAAGGGAACC | | | Mouse | | | |
| 1853 | cg21841556 | ACCTCGACCTTGAAGATGGTGAGTAGCCAGCCAAAGTACGATCTAATACG | | | Mouse | | | |
| 1854 | cg11832532 | CGCCGTACTTGTTGGAGCCCACATCGAAGAAGAAGCGCTTGTTGTCCACA | | | Mouse | | | |
| 1855 | cg19674753 | TCGGGAGGCTGATGCAACTTTCCCTTTAAGAAAGCCACCTGGGCGCACCG | | | Mouse | | | |
| 1856 | cg19683256 | GAAGGACCCTTTCCTCTCGCCATGCTAATTCAGAAAATCTGCTCTTAACG | | | Mouse | | | |
| 1857 | cg06663733 | AAAGAAAACCATGACAACTGTTTGTACCTCTTGCTTTATTATTACATCCG | | | Mouse | | | |
| 1858 | cg14159149 | GCCAGCAACTGTGCCAGGAGCGGCTGGCACGGGCTCGTGCCCAGGAGGCG | | | Mouse | | | |
| 1859 | cg17695612 | CGATTCAGCTCTTGCTGAAGGCCTTTAACTAGCTGTTTGAAATAAGAAAA | | | Mouse | | | |
| 1860 | cg15647529 | CGGCTTCTGCTGTGTTGCCTTGAAATTTATTATTCTGGAGATTTAAAGAA | | | Mouse | | | |
| 1861 | cg06885782 | GCGAGCTCGATTCTCAGCTGTCAGCAAAGGCAGCATTGATCTGCTGAGCG | | | Mouse | | | |
| 1862 | cg13275896 | TAATTACCTTTGCAGAGCCAGCAGATGGTGCAGAAAGCACTGCATTGTCG | | | Mouse | | | |
| 1863 | cg20735499 | CGGAACATAAGGTTTAAGAAACACACACACGTTTTCTGGGGTCTCTTGTT | | | Mouse | | | |
| 1864 | cg04317929 | CGGCTCTGACGAACAGACCTGTCCTGAGCCTGCCGGTCAGTGCATAGAAG | | | Mouse | | | |
| 1865 | cg19961913 | CGTGCCACCCAGCTGCTGCATGGTCACGTCCATCTGGAGCTCTCTAGCTA | | | Mouse | | | |
| 1866 | cg04801716 | GGGCTGTGGGTGCCGCTGAGCAAGATGGAGCTGTCTGCAGTGGGCGAGCG | | | Mouse | | | |
| 1867 | cg04121944 | CCTTGCGCTTGAAGCGCTGCTGGCACACCGGGCACTGGTAGGGCTTCTCG | | | Mouse | | | |
| 1868 | cg04407088 | TCATACCCAATTTATTACCGCTGAACATATGGCCAATATTTTGACTCACG | | | Mouse | | | |
| 1869 | cg04447890 | ACAGCTTCTTGGTGCTCATGTTTTCTATAATTGCCCCAGCCATTTTTGCG | | | Mouse | | | |
| 1870 | cg16181889 | CGCAGAAAATTCGCAAATCCTTTGATTGTCTGTTTAAAATGAGGAGGAAA | | | Mouse | | | |
| 1871 | cg01574836 | CACAAATGTCTCTTGCATTTTCTTGCCTCAGAAGTGAAACCATCATATCG | | | Mouse | | | |
| 1872 | cg26070145 | GCTTATTGTGTGTCTTTCTTTCATACTGCTAATCCGGTTTACACATCACG | | | Mouse | | | |
| 1873 | cg25452665 | AGGACCCGGCCGGCCGCCTGTTTATATTAGCGCGGTGTAAAATATTCTCG | | | Mouse | | | |
| 1874 | cg12502231 | AACCGAGATTGGAGTCATATGGGCCATAAATCATTGAGACATACTCTCCG | | | Mouse | | | |
| 1875 | cg12277614 | TACTCACTGTTCCTGACTGTGGCATAGCAAACACATCAATCACTCTGACG | | | Mouse | | | |
| 1876 | cg27269484 | CAGATCCTGGAGGCTGTGCTACACTGCCATCAGATGGGCGTGGTCCATCG | | | Mouse | | | |
| 1877 | cg10277837 | CGAGCTCATGGTCATTAATTTGTGAAGTGCAAAAATACTAATTTTTCTCG | | | Mouse | | | |
| 1878 | cg04561327 | CGCACACACAGGCTGCTGGGTAAGTGGCAAGATGGCTCCCCTGCATGTCT | | | Mouse | | | |
| 1879 | cg14593595 | TTAGTGGCCACAGCACGATTCTGAAAATATACCTTCCTTACGATTTAACG | | | Mouse | | | |
| 1880 | cg14689223 | GGGAAGGCAGCCAGGTTTCGGGTGGGCTGGTCCTGCAGGGACTGGGATCG | | | Mouse | | | |
| 1881 | cg00036788 | ACCACATGTTGCAAGGTTCAAATAGTGCCTAATGAAACAGTGACTAAACG | | | Mouse | | | |
| 1882 | cg00083068 | CGGAGGCATATGGTCTCGTACACAAGAAATAATGTTCATGTTAAATCAGA | | | Mouse | | | |
| 1883 | cg06637963 | CATTTAGACACAAGCGAGAGGATCATGGCGGATGGCCCCAGGTGTAAGCG | | | Mouse | | | |
| 1884 | cg14458704 | CGGCCCCAGTGTGAGCTCATACATCAGGGCTGACAGGCTCCAAAAGCCCC | | | Mouse | | | |
| 1885 | cg11882147 | GCCCGCGTGGTGGGGGCTGGGGCTGGCCAGCAGCTCCTGCTCATGGCCCG | | | Mouse | | | |
| 1886 | cg13529847 | CGAGGGGAAAAATTAATTTCTGCCTATCGTTAATTGAGAGAATTGTGTGG | | | Mouse | | | |
| 1887 | cg26575155 | CGGCATGACAGGCAGCAATCCTGTGTCCCCTGCCTCATCCAGTTCCCCAG | | | Mouse | | | |
| 1888 | cg07479479 | CGCGGTTTGTCCCGTTGACAGCGTAATTTAAAGAAATATATGGAAGGCTG | | | Mouse | | | |
| 1889 | cg17797814 | CGGCCGCTCCATAGGTCGAGAAATGCCTCACTGGATCATAGGCGGTGGAA | | | Mouse | | | |
| 1890 | cg01901658 | CGTTTGAAGAAACCATTATGACAAGCAGGTCTAGGGAAGCTGCTGCAAAA | | | Mouse | | | |
| 1891 | cg09522374 | CCCGCAATGAAGTCAGCACTCTGCTTATTAAGTGGAAAAAGCTGTGCTCG | | | Mouse | | | |
| 1892 | cg21141161 | CGCATGGAAGAAGAGTGCTGTTAAGGCCTCTCCATTAATCAACAGGTATG | | | Mouse | | | |
| 1893 | cg14807945 | CACTTGCCTTCCGAACAACTGCACAACAGGTGCAAATTAAAATGAAAACG | | | Mouse | | | |
| 1894 | cg01990488 | ATTTTTAGGGCCTCCTCCAGAGGCTCAGGCCCAAACAGATGTCCCTCTCG | | | Mouse | | | |
| 1895 | cg24648594 | GGGTAGCGGCAAACTTCAAAGCCATAAATCTTCCCTCTGACTGGCTGGCG | | | Mouse | | | |
| 1896 | cg23300110 | CCTGCCCCTCCCTACCTCACAGGCATGTTGTGAGAATAAATGAGGTAACG | | | Mouse | | | |
| 1897 | cg03082580 | CGGCTCTGTGGCACTCATACAGCTAGATAACCAAAGAGAGAAACGGGCCT | | | Mouse | | | |
| 1898 | cg05200513 | TTCAGTTGGGTGGGTGGAGCTGTTATGCAAACTCCCGCTCTCCTCATTCG | | | Mouse | | | |
| 1899 | cg05825073 | GGAAACCCGCAGCTAATGGCTCGGCAGTGATGCGCCAGGTGTGGGCCTCG | | | Mouse | | | |
| 1900 | cg00315292 | ATTAAGCGAGTCTGACAGCAGCATATTCAGGCTCGACAAGGGAACAGGCG | | | Mouse | | | |
| 1901 | cg25981029 | CGCCCCGGCTGGATTGGCCGAGCAAGCCTGGAAAATGGTAAATGATCATT | | | Mouse | | | |
| 1902 | cg09723377 | CGCCATCAGCCCCCTAGCCAGCCATCTGCTCCGAACCAAATGGCGTTTTT | | | Mouse | | | |
| 1903 | cg00809149 | CAGCCTGTCACCTTCAGGCAAAATTCAAAAATTCTGTTTTTATCAAAACG | | | Mouse | | | |
| 1904 | cg00863740 | CCTCTTCTGGCTGCTCAGCTGCTGCTGCTGCCGCTTACTGAAGTCCTGCG | | | Mouse | | | |
| 1905 | cg27026033 | CGGGCCCCAAATCCCCATGTGGTCCCGACATCATTGACATGGCGGAATCC | | | Mouse | | | |
| 1906 | cg22666763 | CGCGCAAATTGCAAAGTTGTGAATATGTTCTCAGATAATGAGCCTTCCCA | | | Mouse | | | |
| 1907 | cg21390110 | CGCTGGTGTGACAAATCAGATGAAGATGATTGGTCAAAACCACTCCCACC | | | Mouse | | | |
| 1908 | cg19272508 | CCAGGAGGTGCCCGCGGGCGGTGGAGGGCTGCTGCAGGTGCGTCTGCACG | | | Mouse | | | |
| 1909 | cg04845649 | CGCCAAGGAAGTGCTGCCCCAGTATTTCAAGCATAGCAACATGGCGAGCT | | | Mouse | | | |
| 1910 | cg01902998 | CGCGGACCCGCCCAGAGATATAAATAACATTATCTGAGGAGGGACATTCC | | | Mouse | | | |
| 1911 | cg21142636 | CGGGTATTGCTGGTGCTGCTGCACCTTCTGCTTGGACCCGCCAAGCAGGA | | | Mouse | | | |
| 1912 | cg18776124 | CGAAGCAGATTTCTTCACACTGGAGTCATTCACATCATGCCATCTCTTCG | | | Mouse | | | |
| 1913 | cg07991667 | TTCCTAGAGCAGGCCCAGCAGGTGAGCGGGCTCCTGGCGCAGCTGTGGCG | | | Mouse | | | |
| 1914 | cg19626252 | CAATCATTGGAACAAATAGCTAACATTTAACGTTTACACCCGCACTGGCG | | | Mouse | | | |
| 1915 | cg11735605 | CGTGTGTTTGTGCACTGCAGTTGGTGGTGGAAACTAAGGCAGTGGATCTG | | | Mouse | | | |
| 1916 | cg03201458 | CGACGGAGACCTTTGTGAAGGATATCAAGCCTGGGCTCAAGAATCTGAAC | | | Mouse | | | |
| 1917 | cg25649770 | CGTCCTCCAGATCGCTGAAAAGGAGCAGGAGCTGTTGGCCTCTCAAGAGA | | | Mouse | | | |
| 1918 | cg03182693 | GTTCCTTCACAGAGGCCAAGATGCTGGCGGTCGACTCCACCTCTGAGTCG | | | Mouse | | | |
| 1919 | cg04307172 | CGGCCCGGGAACCCTGGGCTGCTGGCGCCTGCGCAGAGCCCTCTGTCCCA | | | Mouse | | | |
| 1920 | cg12374442 | CGTCTTTTTGACGCAGGGAGAAATGGCAAATTTTAAGTACGTCATTAATA | | | Mouse | | | |
| 1921 | cg11741231 | CGTGATTACAATGGCTTATTTCATGGAATATTAAGTTCAAATTTTGCTCC | | | Mouse | | | |
| 1922 | cg13071028 | CGGCCAGAGAAGTTCAAACAATCTGGAAACTGGAGGTAACAGGTGATTTA | | | Mouse | | | |
| 1923 | cg17284641 | CGGCATTGATCGTCCCTGAGCTCATTATGTCACAGCTGGGGAACAGCTGG | | | Mouse | | | |
| 1924 | cg04765298 | CGGGGAGTTCTCCTGGCCCAAGAATGTGAAGACCAACTATGTTGTTTGGG | | | Mouse | | | |
| 1925 | cg13273551 | CGCGCTGGAAGTGGGAGCTGATGAGTGAAAAGAAAAAAAAGTCTTTGGAT | | | Mouse | | | |
| 1926 | cg21818536 | AACTTTTTGTTTTCTCCTTTCTTTGAAGGTTGTCAGACGTTACCGAGTCG | | | Mouse | | | |
| 1927 | cg13993270 | TATCCTTTTGATGGCTATAATTTATTCCAAATCGTCCCTGGACTGAAACG | | | Mouse | | | |
| 1928 | cg22978368 | TCCCTTTTCATTAATAATGAAAACCAGGGGGCAATAAAATGTTCTTAACG | | | Mouse | | | |
| 1929 | cg22670250 | GCTTTGGTATGTAATTATGCAAAACACTTTCCATAAAGACTTGCCATTCG | | | Mouse | | | |
| 1930 | cg27650171 | CTCAAAGTCCACTTGCGACAGGAACTGGTTATACAGGACACCTGGGGTCG | | | Mouse | | | |
| 1931 | cg06489241 | CGACTCCAAGATGTCAGTCTCCATGAGGTCACACTCCATGCTACTGTGGT | | | Mouse | | | |
| 1932 | cg14919009 | CATTTTTGTTTTTCTATCAGCTGAAATCGCTCTAGCATTTGCTCTACGCG | | | Mouse | | | |
| 1933 | cg14329189 | CGGCCTCTCCAAACTGATTGATTAGTCATGATCCCCGCAGTTTTAACAGG | | | Mouse | | | |
| 1934 | cg00549985 | TTTAAAACGCCCAACGCTGCCAAGTCAGAAAAGCGTCTCCTGATAAAGCG | | | Mouse | | | |
| 1935 | cg06889609 | GTGTAATATGGCGAAGACCTACGATTACCTGTTCAAGCTGCTGCTGATCG | | | Mouse | | | |
| 1936 | cg23534990 | CTTTAACATTTGGGATGCTGCAAATGCCGAAGTTAAATGAAATACCTCCG | | | Mouse | | | |
| 1937 | cg15258337 | GCTTGTCAGTGTGATGAAGATTGGCACCCAGGTAAGCTGTCACTCAACCG | | | Mouse | | | |
| 1938 | cg01656588 | CGGGCCAGACAACTCTATTATTGGCTTCATAATTGCTTAATTAAACTTTT | | | Mouse | | | |
| 1939 | cg00907438 | CGTCAAATTGCCTCCCAGGGTGCTGCAGTGGAGCGCACTGATTCGTACCC | | | Mouse | | | |
| 1940 | cg15708373 | CTGGTGATGTAACACCCATGTCAATACTTCCCAGTGAACGCACGTGTTCG | | | Mouse | | | |
| 1941 | cg02529685 | CGGAGATCATAGACACGGAAACTGTGCAACACAGGACCAACTCCTGCTAA | | | Mouse | | | |
| 1942 | cg07456629 | ACACAGGACCAACTCCTGCTAATGCTGAGGTATTTGGGAAAGCCTGATCG | | | Mouse | | | |
| 1943 | cg16113298 | TGGAGGATGATGACAGAGGTCAGGCTTCGCTAATGGGCCAGTGAGGAGCG | | | Mouse | | | |
| 1944 | cg20199880 | CCCGGGATTTGGTTGGAATTAATCTGCATCTCTAGCCAGGGTCTCATGCG | | | Mouse | | | |
| 1945 | cg12374136 | AGGTACAGGATGGTCCCTTTGAGCACTGCGTAGAATTTCTTCCAGCCACG | | | Mouse | | | |
| 1946 | cg16969806 | TGCTCACTCTGGTTGCCGCACTGGCCCAGCTGCAGGGTGATGATCTCCCG | | | Mouse | | | |
| 1947 | cg25716835 | CGCTGGCCTGGGCTAATAGTGCATGGTCGCTTGCTTGGATGTTCTGAGTG | | | Mouse | | | |
| 1948 | cg05434807 | CGGTTTCTGTAAAAGCATCGTTAGGAAGTGGGAACCATGCCTTTAATTCT | | | Mouse | | | |
| 1949 | cg09710669 | TCTCTCATCTCGCTCGGCTGCGGGAAATCGGGCTGAAGCGACTGAGTCCG | | | Mouse | | | |
| 1950 | cg05513929 | TTCCCGCCAATTATTATGGTTGCTTGGCTATTGAAGATTGTGAGCTGACG | | | Mouse | | | |
| 1951 | cg10004854 | CGGGCCCCGGTGTCCCCGGCCAGCACTATGCCCATCTTACTGTTCCTGAT | | | Mouse | | | |
| 1952 | cg06382378 | CGTGATCTGATCCCTAAGTTGAGACCTGTCTTCCTGTAACGCTTCCGAAT | | | Mouse | | | |
| 1953 | cg06198114 | AATTTGATTACTATAACCATACTTTTTAACTGCTGTCAGGAAAGACAGCG | | | Mouse | | | |
| 1954 | cg10429476 | CGGCAGGTGGAGGATTACCCTGTGGACATCTACTACTTGATGGACCTGTC | | | Mouse | | | |
| 1955 | cg06795598 | GAACGTGGACTAGACCCTGACACACTACCATCTCCTTCCTCCAAGGCTCG | | | Mouse | | | |
| 1956 | cg04784672 | CGACTGTGAAAGCCACCTGGAGCCACCTTGCCGGGATTGTACCTGCAGGC | | | Mouse | | | |
| 1957 | cg07479336 | GCTGCCTTGGCAGAATTCAGCTCTATGAATCACTTCGGAAAATTGGTTCG | | | Mouse | | | |
| 1958 | cg19351577 | CTGTGATCCATTCATTTCTCGCTCTACCTCCTGTTGCATAAAATGATGCG | | | Mouse | | | |
| 1959 | cg11286097 | CGGCCGTGCTCAACAACGCCTTCTACCTGGAGAACCTGCACTTCACCATC | | | Mouse | | | |
| 1960 | cg07679131 | TTTGGCTCGCCTCACCGGCAGTAATTTAATTTTTCCTTCATTCTGACTCG | | | Mouse | | | |
| 1961 | cg18808650 | CGGCCTCCTATGGTCATGCTGTAGAGACAGGAGATATGCTTGTTCTTGTT | | | Mouse | | | |
| 1962 | cg08030302 | CGGCTGTTGATCAAAGTGTTTTCTGGAATGGAAATATTGATGACAGGAGA | | | Mouse | | | |
| 1963 | cg19296063 | CGAGGCCGTTCACAGTACGACGAACGTGTTTCCGCTGGGGAACCTTCACA | | | Mouse | | | |
| 1964 | cg08921975 | GTTACAAAACCAAACTCTCACCACCTCCTTCTCCAGCTGTAAGCTGTCCG | | | Mouse | | | |
| 1965 | cg09060651 | AGGGCGGCATGCTAATGTGGAAATTTAAAGAGCCGCTCGGCTTTAAATCG | | | Mouse | | | |
| 1966 | cg09084199 | GATCGAAGTCATTAACATATTCCATGGCCAGGGGACTGGTGGGCAGGTCG | | | Mouse | | | |
| 1967 | cg12149905 | CGCCGGCTTTAAAGTCTCTGCCAGGATCCATGCTCACATGTTACTTCCTG | | | Mouse | | | |
| 1968 | cg09200936 | CGGCTGCAGATATATGCAATATTAAAGAGCGCTTATGAATTTTTGACATC | | | Mouse | | | |
| 1969 | cg09428649 | CGCCACTTCAGCCTGAAACTCCACATGCGTTGCCATCAGCACTTCCTGAG | | | Mouse | | | |
| 1970 | cg20375718 | AGCAGAGCCTGGTGAATATGACATCCCGCCTGCGACACCTGGCAGAGACG | | | Mouse | | | |
| 1971 | cg20718192 | CGGCAAATCAGGGGGGGGGAACTGTCAGTTGCAACCAAAGCCTGCCTGGC | | | Mouse | | | |
| 1972 | cg16861669 | CGTGAAGCAGCAGCAGCTGCCACAGCAGGCAAGCAGATGTATGAATATAG | | | Mouse | | | |
| 1973 | cg11102343 | TGCCTGTGGCGCTCCCAGGAAACACCTTTTTACATAAGATATTGCCCACG | | | Mouse | | | |
| 1974 | cg13684852 | ACAATTTAGATTACTTCATCTCTGCTAGCAACAAACTGAATGAAATTTCG | | | Mouse | | | |
| 1975 | cg13170453 | ACACATCAAACAAATACTTCTGTCTCCGGAGAGGAGTGTGCGAGAGATCG | | | Mouse | | | |
| 1976 | cg09772534 | CGGTTTCCAGGAAAGAAGAGAGAGGCGGAAAAGTTAACTTTCCGCCACCC | | | Mouse | | | |
| 1977 | cg11667953 | CGGCTTGAAGCTGAAAGGTGGAGTGTGTTTCTTTATTGAACACTGCATTC | | | Mouse | | | |
| 1978 | cg19926979 | CGAGGGCTTCATAAGCCTTTGATACAGTCTGATCTTTGAAACCTTTCCAA | | | Mouse | | | |
| 1979 | cg18538769 | TTGGTGGCAGTGTCAGAGTGACGTGGTAGGTCTCCATGGAGACGGCAGCG | | | Mouse | | | |
| 1980 | cg20377527 | GGGAAATTTTCTTCATTTTAATGTTCTTTCACAACCCACATTCAGTTTCG | | | Mouse | | | |
| 1981 | cg18881568 | CGATCCTCAATCAGTGGGTGGAGGATAACAGGGTAGATTCACTTGTGTGC | | | Mouse | | | |
| 1982 | cg26131171 | CGGAGATGTAGAAGATATTACAAGCTACTGGATGCACTGTCAGATTAACT | | | Mouse | | | |
| 1983 | cg18688640 | ACAGCCCTCTCCAAAACACATCATAAAACTAAGACTGAGATGAAGCATCG | | | Mouse | | | |
| 1984 | cg00658982 | CGTCATCTATGGGTTCTGGTAGTCCTGGGAGAGGCAGGGAAATGTCCTCG | | | Mouse | | | |
| 1985 | cg06370256 | CGGCCACGAAGAGGATTTGGAGGCGCCGCAAGTCAATATTTGATCACAAA | | | Mouse | | | |
| 1986 | cg01376725 | ACAGCCTTCCATGGTAAGGCCTGCGTGGAGCTTTCATTGCACCCAGTACG | | | Mouse | | | |
| 1987 | cg14830088 | GAATTAATGCCAGACATAGTTTTCCTGAACTCTATCCAACCGCCTAAGCG | | | Mouse | | | |
| 1988 | cg23815914 | CGGTTATGTGTTACAATGTGTTATGTGATAAATACGCTACCCGGCAGCTA | | | Mouse | | | |
| 1989 | cg02258144 | CGAGAGCTTCCTGAGAAGATGTCTGAATTTTTATGGCCTTCTCATTCAGC | | | Mouse | | | |
| 1990 | cg15985773 | CGGAGAAAATCAAGGCGGAGATCACAGTGGGGTAAAGGAATTATTAAGAA | | | Mouse | | | |
| 1991 | cg09635067 | CCTCCCACCGTGGACTTGTAGTGTTTGCTGAAGCTGTCCTGGGAATATCG | | | Mouse | | | |
| 1992 | cg16611537 | CGGCGGCCAAAGCCATGAACCGTCTTCTGTTGTTTGCAGAGTTGATCTTG | | | Mouse | | | |
| 1993 | cg12041712 | CACCTGGGGCAGTGGGTCTCCAGCTTTACACCAATGCCCTAGGGGATGCG | | | Mouse | | | |
| 1994 | cg16863579 | CGGCCAACTAACAGGTCAGATGTTCAAGTATAGACGAGTCATCTTGCCCA | | | Mouse | | | |
| 1995 | cg26639842 | CGGCAGCAAATTGGACCGGTTGCCATGGCAAATCTGAGCCCTTAAGTCAT | | | Mouse | | | |
| 1996 | cg04613777 | CCTCCTTCTTAAGAAGACTTTCCCAGGTCCCTCTTGGCTGTGGTTGAACG | | | Mouse | | | |
| 1997 | cg24378708 | GTCCTTTCAGGTTCAGGCGCAGCTGCAGCTGGACAGCGCTGTGGCGCACG | | | Mouse | | | |
| 1998 | cg20369280 | CGCAGCAGCACCGCCATTTGTCAAAGTCAACCTTCTGATTGCTTTGGACC | | | Mouse | | | |
| 1999 | cg05030744 | GCTCCTCGGGACAGTTCCCACACTGCAGTGCCTCTGGTGAGGAGACAGCG | | | Mouse | | | |
| 2000 | cg04839527 | TCACCAATAAAATTGGTCTCAGCATGGAGCGTAATTGCAACAAAGTGCCG | | | Mouse | | | |
| 2001 | cg05052045 | AATATCCCTCATTAATGCCACTTTATATTTACAGTGTGTCACTGGAGACG | | | Mouse | | | |
| 2002 | cg01824230 | CGGATATCGGGCACCTCCATGGCCTTCAAAAACATTGCCTCCAAAATAGC | | | Mouse | | | |
| 2003 | cg05165194 | GCTGCTCGCTCCATGATGAGATGCTAAATGAAAAGCTGGTGCGACACACG | | | Mouse | | | |
| 2004 | cg18404903 | CGGCGTCCCACCAGTCTTTTGGGGGGCTGATGTACATGCACCACAGCTCC | | | Mouse | | | |
| 2005 | cg18512092 | CAATAGGCGAGAGACTTCTTGTTTCCTGGCAGAGCGGGGTCCCGGCACCG | | | Mouse | | | |
| 2006 | cg18539981 | CATCATTGGATCCTTCTTTGTTCTCAACCTAGTCCTGGGAGTGCTTTCCG | | | Mouse | | | |
| 2007 | cg18552533 | AGAGGACAGCCTTTGGAGAGCTGCCCTGTCTGGGGACTGGCCCCTCCCCG | | | Mouse | | | |
| 2008 | cg11602744 | TGACGCGGACTAAATCATTTTCATTTAATTTCCGGTAAACAAAACCCACG | | | Mouse | | | |
| 2009 | cg15166827 | GTTACCCTGGGTGTATTTTGTCAGTCTGGTCATCTTTGGATCCTTTTTCG | | | Mouse | | | |
| 2010 | cg26098364 | ATGTAATCAGCGCCCATGGGGAGCCAGGAGCGGAGGGTGATGACATCACG | | | Mouse | | | |
| 2011 | cg16163981 | CGAGATGGACTTCTGGAAGGTGGACCTCAAGTTCCTGGACGACTGTTGCA | | | Mouse | | | |
| 2012 | cg19279211 | TACGTTGTTAGCAAGAATGCCCCATCACCACATCTTTCCAGAGCCTTTCG | | | Mouse | | | |
| 2013 | cg04817397 | CGGGTGTCTGACTCGAATGACAAGCGAGCTGATTTTTTCAGTACATAGCT | | | Mouse | | | |
| 2014 | cg12386526 | AATCTCTCATTCCTTGTTGTCAGCAATTCTCACCTAGTGCAGAGAATTCG | | | Mouse | | | |
| 2015 | cg25249359 | CCCTACAGACTCAATTAGATTCATTAATCTGCTGTGTAGACCTGTAAACG | | | Mouse | | | |
| 2016 | cg13141094 | CGGGGTAACCTTGACACAGTTGCGGCAGTCGCTAATGGCAGACACACACT | | | Mouse | | | |
| 2017 | cg16800641 | GTCTAACCAATATTAAAATGCGGCCACTTTTTAAAAAGCCACTTTAAACG | | | Mouse | | | |
| 2018 | cg07890174 | CGTTTCAAGAAATGCGGTTAACCTCGCAGTACTAAAACTGAATGAACAAG | | | Mouse | | | |
| 2019 | cg20588435 | TCACTTCATTTCGTTCAATTTCGTTCAATTTCATTCCTTTTCATCCAGCG | | | Mouse | | | |
| 2020 | cg00823476 | CGTACTTTGGCTGGCTACTCACCATCTTCAAGGTCGAGGTTTCTGGAAAA | | | Mouse | | | |
| 2021 | cg14192599 | TAGCCAGCCAAAGTACGATCTAATACGGGAGGTAGGCCGAGGTAGTTACG | | | Mouse | | | |
| 2022 | cg26466145 | CGGGGCTTGATGTCTGCAAAATGTCGGAAACGCAGCCAAGAGCTGCTAAC | | | Mouse | | | |
| 2023 | cg10918171 | ATTAAGGCAGCCTGTTATTGTGCGAGGCTGAATCAGTGGCTCTTTGTGCG | | | Mouse | | | |
| 2024 | cg06923126 | CGCATGCGGGGCGGAAAAGATTGTATTTATCACCTGTCAGGATCTGCCAG | | | Mouse | | | |
| 2025 | cg19962757 | CGCAGTCTGAAAAGCCTTCGACCTAAAGCAAAAAGGTCCCCAAGTGCCAC | | | Mouse | | | |
| 2026 | cg22979709 | CGGATCTCCCCAGGTTCCAGAGGATTGGGCCCACAGGGGTCATGCTCAGT | | | Mouse | | | |
| 2027 | cg16825428 | CGTGCGTTCACTGGGAAGTATTGACATGGGTGTTACATCACCAGCAGCCA | | | Mouse | | | |
| 2028 | cg10450039 | CGGCCTGTACAAAATGCAATGAATCAGGTTGGGATTGTGCTGAACGTACA | | | Mouse | | | |
| 2029 | cg21066109 | ATATAGCAGCTTGCTGTTGATTACCAGGGAAATGAACTCGCTGTCTGGCG | | | Mouse | | | |
| 2030 | cg21114170 | CGCTCATCTCTCACGACAATGAAGACCTCCTAGCGTCCAGGTTTCCGGCC | | | Mouse | | | |
| 2031 | cg23632380 | CGGGCAGCATCGATCGTGGCTCCTTTAAGACAAACTCAGACAGACATTTT | | | Mouse | | | |
| 2032 | cg10537936 | TCCATCTTCTGCCGCATCATGAGGTAGGCGATAACTAGCGTTGGGGAGCG | | | Mouse | | | |
| 2033 | cg04318752 | CCACGTTCTTATCATCTCAATTGCCGATTTTCATTTTGGTAACTTGGACG | | | Mouse | | | |
| 2034 | cg09408655 | ACTACATTAGGAATAAAACCTTCCACTTAAACACTTAAATGAAAACATCG | | | Mouse | | | |
| 2035 | cg12076803 | AGGCTGTTTGCAACAACCACTTCAACTCTATTTACAGAAGGGTTCCCACG | | | Mouse | | | |
| 2036 | cg12881209 | TAAACCACAGAGTCAAATAGCTCTAATAGAGATGAAGCCTGATAGATCCG | | | Mouse | | | |
| 2037 | cg21809124 | GACACGTAAAGAAGCAGCAGTCCTGCCCCAGTTCTCCTAAGAAAAATCCG | | | Mouse | | | |
| 2038 | cg18701907 | CGGCCATGCTCGAAGCCAGCTCTGCAGCTCAGCCAATCAGTGACATCATT | | | Mouse | | | |
| 2039 | cg26409285 | CGGGGTGAAAGTCGGCTTCCAGGCGTTCGATCTCCAGCCTTCCAGCTCAC | | | Mouse | | | |
| 2040 | cg05198393 | TTGATGCCATTGTTTCTGCTACAGATGGTTCTTTTAAATACAATAACACG | | | Mouse | | | |
| 2041 | cg14140337 | CGGGGCTGGAAGAGCTTCCACGGGATCCTCAAGGGCATGATCCTCTACCT | | | Mouse | | | |
| 2042 | cg17095319 | CGCGGAATATGTACATTTTTTAGTCTTACTTACGCTTTCAGGGGGTTGTG | | | Mouse | | | |
| 2043 | cg14119482 | TGGTGCATGTGGCTTTGAACTGGAGCCGTTCGCGTTTCCTGCAGAGAGCG | | | Mouse | | | |
| 2044 | cg22956116 | GGAAATGAATGACAGCTTACCTGATGCCAATCTTCATCAGACTGACACCG | | | Mouse | | | |
| 2045 | cg14497036 | ATCTGCCGCCAAGTTTCCAGGGAGTGACAGGGGACAGCAGGTACAGATCG | | | Mouse | | | |
| 2046 | cg06363348 | TGATGGACACGGAGCTTGCTGCAGCACCTATGACGCCAGAAATCTTGTCG | | | Mouse | | | |
| 2047 | cg24217623 | CGCGGCTCATAATTGTTTTTCACACATAAGTTATGCAAATGAGCTTTTAT | | | Mouse | | | |
| 2048 | cg23419136 | CGGCCGATCAGTGAATGGTCACCCCAGTCTGTCCAGTACAGGTACCTGGC | | | Mouse | | | |
| 2049 | cg27537290 | CATACTGCAAGAATATTTATTGAGCACAAGCTCAATCACCGCATTGAACG | | | Mouse | | | |
| 2050 | cg00833227 | CGGCAACAGTCCCCCCAGAACAGGCGGAGTGTGTGTCTGCCATTAGCGAC | | | Mouse | | | |
| 2051 | cg00570985 | CGTGCCCCAGGACTCAGAGAGCCAGCTGCAGGAGCAGGAGAAGCGGATTG | | | Mouse | | | |
| 2052 | cg23446200 | CACTCGCACTTCGCATTTTCTAATTACACCATCTGTGTCAGACTCTTTCG | | | Mouse | | | |
| 2053 | cg24429861 | CCGGTGTCTGTGCTATTGCTATGGGAACTGGCCATCCTGGGGGGGGGCCG | | | Mouse | | | |
| 2054 | cg26976071 | AATTCAGGTTAGTGGAGGCCGAGGATCAAAGCGCTCACCTCACGCTATCG | | | Mouse | | | |
| 2055 | cg24653257 | CCTGTTTATATTAGCGCGGTGTAAAATATTCTCGCTGTCTTGGGGAATCG | | | Mouse | | | |
| 2056 | cg27332443 | CTTTGTTAGCACAGCTCAGTTCAAATGTCTGATTAGTCCTTAGGAGATCG | | | Mouse | | | |
| 2057 | cg21279088 | ACTTTCCTACTTACCAAACCCGTCGCCATTACCAAGTCTTTCAAGCTTCG | | | Mouse | | | |
| 2058 | cg05522906 | CGAGTTTGCACTTCTGTTTACAAAGCAATCCTGCCATCAAAAGAGGAACA | | | Mouse | | | |
| 2059 | cg09415540 | CGATGGGATAATGAGACAGATGTCTCTCAACTGGAAGGACATTTTGACAT | | | Mouse | | | |
| 2060 | cg05163400 | TAAGTGCACGCTTCCCCCACTATATAGCAGCAGACTGTGTTGCCCCTACG | | | Mouse | | | |
| 2061 | cg25670483 | CTGCTTTTTGGTCCATGTTTAAAAAGCACCAGTGACCTTTTTTTATTCCG | | | Mouse | | | |
| 2062 | cg25879860 | CGTGCACAGCTTTGGAACTTTTGGCTATTCGGTATTTGTGAGTTTTGGAA | | | Mouse | | | |
| 2063 | cg25998250 | AGTGTTCAAATCGACATCATGGAGTCCATTTCTCCTTCGACTAGCATTCG | | | Mouse | | | |
| 2064 | cg08187246 | TCACCATGGAGCCCAGGATGGCCTGCAGCAGCAGCAGCACGATGCCCTCG | | | Mouse | | | |
| 2065 | cg26234638 | CGTGCACCTGGCTTGTCCCCGAGCGTAATATTCTTCAATGGAAACGGATC | | | Mouse | | | |
| 2066 | cg01149078 | GGAGAAGTTCACATTCCGGATTCTGCTCCGCTGCCCAAGGTGCAATTCCG | | | Mouse | | | |
| 2067 | cg06160165 | CGGACAGATCGATTACTCAGACACAAACGGATGTGCCAAGGGTGCCAGTC | | | Mouse | | | |
| 2068 | cg04671066 | TTGAATTTTCTTCACAATTTGTAGACAATTTGATGGATTAGGTCCCCGCG | | | Mouse | | | |
| 2069 | cg09816441 | AGCCTTAATATCTTACTTTGCAAATATAGTTTATTCCTTCAATAAAGCCG | | | Mouse | | | |
| 2070 | cg10651829 | AAGCCCCATTGCCCTCTTCTTTCTAAGCTGTCATCCTCCTGCTGCAATCG | | | Mouse | | | |
| 2071 | cg00414520 | GCACGTCCGTTACAAATAGGTAGTTTTGTTTCTCTTGTTGTCGCTACACG | | | Mouse | | | |
| 2072 | cg07289766 | ATTTGCATTTCTCCCTCATGCAACGCCCCTTTATGTAATCCATACAAACG | | | Mouse | | | |
| 2073 | cg01932632 | CGCCTGCTCCTCGTTGATGGGCTGGTTGTACAGCCGCAGGATCTCCTCCA | | | Mouse | | | |
| 2074 | cg19933464 | CGGTGGCACCAGCTCCTGCACAGGCCACAATGAACAGGTGATAGGACATG | | | Mouse | | | |
| 2075 | cg13752936 | CGGGGTGAATTTAATTGCTTTAGTTAAGTGGAAATCGGGTTAAAAATGAT | | | Mouse | | | |
| 2076 | cg14678895 | GACCTGTCGTGCCCTGCATGTTCAGAGTCTGTCATGTTTGGTCAAGAACG | | | Mouse | | | |
| 2077 | cg21244114 | GACAACAGCGATGAGGATGTGGTGCAGCACCAGGACCATGCTCGCAGCCG | | | Mouse | | | |
| 2078 | cg15026078 | CCGCGGCTATGCCCAGTCCTGCCGCTTCAAGAGGGTGCAGCAGAGACACG | | | Mouse | | | |
| 2079 | cg12285520 | CGGGCGATCCTCCGACTGCTCGGCGCCAACCACAACATGCTACCCACCGT | | | Mouse | | | |
| 2080 | cg18429525 | CGCGTGGCAGTGTGGATCCTGGAGAAGTATTACCATGACTTCCCTGTCTA | | | Mouse | | | |
| 2081 | cg22502858 | TTGCCCGTGCTGTACCTGTTCTGTGGATGAACAGAGGACTTCAGTCTGCG | | | Mouse | | | |
| 2082 | cg10221809 | ATCAGGGCCTTATTCATTAGCGCATAAACAATTTTGTTTCTCGGCACTCG | | | Mouse | | | |
| 2083 | cg04008656 | CGCACCCACCATGATGGAAGACGACGGGCAGCCCCGGACTCTGTGAGTAC | | | Mouse | | | |
| 2084 | cg04197976 | TTTTCAATACAACCAGATCATTGCAGATAATTGTATTACACAGTGTATCG | | | Mouse | | | |
| 2085 | cg25602724 | ATCGGTCATTCATAATTAACTAGTGATAATGTTCTACACTAATTTGTCCG | | | Mouse | | | |
| 2086 | cg09563729 | TGCTTACACCTGACTAAATCATCAGGCTGAAATCGGAGCCGACTCCCACG | | | Mouse | | | |
| 2087 | cg20655014 | TGATTAAAATAATTACAAATTGCACCCTGACAAGCAAGAGCAAAATTTCG | | | Mouse | | | |
| 2088 | cg14834925 | AGCTACACTGGTTGATTATTGCAGGAATGAAAGGCACTCTGACCTTGTCG | | | Mouse | | | |
| 2089 | cg05703789 | CGCCTGCTCCTGTTATCAATAGCAAATATGGACTCAGAGAAACAGATAAA | | | Mouse | | | |
| 2090 | cg14252486 | CGGGAGATAAGACACCTAATTGAGAAAACATTTGCAGTGGCATGTGGGGC | | | Mouse | | | |
| 2091 | cg23541245 | CATATTTCTCGCCGGATCGATACGTTTGACTCCCGACAAGACAATAATCG | | | Mouse | | | |
| 2092 | cg05109804 | AGCGTTACCTCTCTAGCTTTTTGTGCGGCAAGCTCAGCTTGTCTCTGTCG | | | Mouse | | | |
| 2093 | cg06537244 | CGGGTGAGAGTTCAGAGTTCAGCAGCAGCAGCCCGAGCCCATGATTCCCA | | | Mouse | | | |
| 2094 | cg00116110 | CGAGTTCATGTGCCAGCCACATTCAGAACAGGGTGTTCTGTGCTCTTCAA | | | Mouse | | | |
| 2095 | cg26257324 | CGGTATTCATTTCTGTGTATCCCTGCCAAAGATCCATTGTGTAATGTTGT | | | Mouse | | | |
| 2096 | cg00773632 | ATTAATCCTAGATGTACAATTCCATTAATAAGGCCGCTTTTTAATAGGCG | | | Mouse | | | |
| 2097 | cg02192891 | CGGCCGACGCTGAGATCCATGCCATTGTAGCCGTAGCCGTACCTGCCGGA | | | Mouse | | | |
| 2098 | cg01309929 | CGGCTCAAGGTCATCTATGGCTCCAGTGCTGGCTTCCATGCTGTGGATGT | | | Mouse | | | |
| 2099 | cg01351677 | CGCCTCATTTAGCTGTTTATTGCGCCTGAGTACGTGTTGCAGCTGTCATC | | | Mouse | | | |
| 2100 | cg18258323 | CCAAAGTATATGTGACCTAAAAAGGCATTGCTCATTCTGACACATATACG | | | Mouse | | | |
| 2101 | cg03536049 | CGGGTGACTTCCCAGCTGCAGAATCCTGGCTGCAATTAGAGACCTATACG | | | Mouse | | | |
| 2102 | cg08977423 | CTCCTTACTGTGGTACTAACCATCCTAGCGGATGGGGGATTTGTCCTACG | | | Mouse | | | |
| 2103 | cg04576672 | CGGAACTAGATGGTTATAGGGACGGCTCCAATCCAGGACAGACAAAATGA | | | Mouse | | | |
| 2104 | cg18010237 | CGGGATAAATTAGTGAAAGGGAAGAAAGAATAAGAAGAAAGGACTGAAAA | | | Mouse | | | |
| 2105 | cg18288070 | AACTCTCTTTTATTTCCAACAGCCCTAATCAGCCGCTCTCATTACAAACG | | | Mouse | | | |
| 2106 | cg10718356 | CGGTGGAGGGAAAGGGGAAAGGAGCCATTTTCTGCTGCACATCAGTCAGT | | | Mouse | | | |
| 2107 | cg06454821 | TAATTACTCGATTAAAACCTATTACACTTATTAGGGGCCGCTATTGATCG | | | Mouse | | | |
| 2108 | cg03445175 | TAGGGCTTGTGCACAGCGCCGTCATGTGAGCGCACGTGGTAGCTCATGCG | | | Mouse | | | |
| 2109 | cg11681358 | TCCTGTTATTCATAAGCGAGTTTCCTCTCTCACAAAGAACCTTTTGCACG | | | Mouse | | | |
| 2110 | cg06763662 | CGGCAAATGAAGTAATCTGCAAAGTCTGTGAACTCATTTGCATAATTGAT | | | Mouse | | | |
| 2111 | cg07699102 | CGCCCCTTAAGAATTGTAATATTTCTGTGTGGTAATGATAAACATTAGTG | | | Mouse | | | |
| 2112 | cg09164670 | CGCGTCACCACATGTCCAAAATATTCATTGCATCAATTCAAGGGCAGTGA | | | Mouse | | | |
| 2113 | cg17807911 | ATCACCGCGGTTTATTTAAGGAGCCAGCCCTCGTCTTTGATAAACTATCG | | | Mouse | | | |
| 2114 | cg14516881 | CGTCTCTATAAGCAGTGTTTTAGCTTAAGTGGCAGTTGCATATTAATTAC | | | Mouse | | | |
| 2115 | cg15485474 | CGTGCCAAATCTGACAGTGATAAAATCTCAAATGGCTCTAGCATCAACTG | | | Mouse | | | |
| 2116 | cg02227188 | CGGGCCACCTCATACCGACGGTCCCTGGTTAAATACATATTGAAGAGAAA | | | Mouse | | | |
| 2117 | cg03590800 | CGTTCCCACGTCATACATAGATGTAACTCTAGAGAAAAACAGTAAAGGTG | | | Mouse | | | |
| 2118 | cg17641835 | CGGGAATTTCACTTGCTGTGCAGATCCCGCTGTCCGGCTGTCAGACACCC | | | Mouse | | | |
| 2119 | cg18033250 | TGTTTACTTCCTCCAGAAACAAGAGCATCATCAGCACGCTCAGTGCATCG | | | Mouse | | | |
| 2120 | cg23120132 | CGGGGAAGAAGGACCTTGTAATAAATAATATTCTGCACATCAAATCACTT | | | Mouse | | | |
| 2121 | cg09233844 | CGCACGATGACGTCAAACGCTGCTATGGCAACCGTTGATTGGTGCCCACA | | | Mouse | | | |
| 2122 | cg05857652 | CGGGGGTCAAAAAATCGCTTCAGGCTGCAACTTTACCTTAGAGACGTTTT | | | Mouse | | | |
| 2123 | cg07234865 | CGGGGTTGGTTGTTATCTTTGGTTATCTAGCTGTATGAGTGGTGTGGAGT | | | Mouse | | | |
| 2124 | cg13832100 | CGGATGGAAATGCCCATAAAGCCGTATCAAACCCTGTGCAGAGAAGGACA | | | Mouse | | | |
| 2125 | cg06149706 | TTGTCATTCAGTTTATCCAGTTTTGGTCACCCATTTTATTTATTTATGCG | | | Mouse | | | |
| 2126 | cg10068143 | GCCCAGAGGAGGCGAGATCACCCGCACTAATTTGTACATATCCTTATACG | | | Mouse | | | |
| 2127 | cg06558044 | GCGGCACTGGGAAACCCAGCAAAGCTAAAGCTATGCTGGAGGCGGGGACG | | | Mouse | | | |
| 2128 | cg18962324 | CGGCGGCGGCAGCTGCAGTGACATGTCCAGCATGAATCCCGAATAGTGAG | | | Mouse | | | |
| 2129 | cg07065655 | GCATCAAAGGGATGCAGCTTCTCCAGGCCCATGAAGGTGATGTTGTAGCG | | | Mouse | | | |
| 2130 | cg15265788 | CTCATTTGAGAAGAGCAGCATTTGAGGCAGCAGCGTTCGCCTGCTGAACG | | | Mouse | | | |
| 2131 | cg01456511 | CGCTCAGTTCCAAGCAGGTATTTGGCTGCGATTAAGTCTCCAATCGGGCT | | | Mouse | | | |
| 2132 | cg07938834 | CAGGTCAACTACAATGATGGCTCCCAGGAGGACCGAGGTGTGTGTGGCCG | | | Mouse | | | |
| 2133 | cg03504911 | CGGCGGAAGGAACACCAGCGACGCTTCTACTGGGCTATGATGTATGAATA | | | Mouse | | | |
| 2134 | cg21550097 | CCCAAAGTAAATAATACAGTCGGTATATAAATCTTTCCATTAAACTATCG | | | Mouse | | | |
| 2135 | cg15918741 | CGTGTTTCCGCTGGGGAACCTTCACACTGTTGGGGAAGATTTTTATAGTC | | | Mouse | | | |
| 2136 | cg13719093 | CGCATACATTCACAAAGTTCTCTGCGGCTGAGGTAGCGGAAGACAGACAT | | | Mouse | | | |
| 2137 | cg07810218 | TCGGCTGTTTTATAAAAGGACAAAACAGCAAGTGTCTGCATTGCATCTCG | | | Mouse | | | |
| 2138 | cg12835327 | CGGGTGGAGGTGCGCTTCTGACAAGCCCGAAAGTCATTTCCAATCTCAAG | | | Mouse | | | |
| 2139 | cg03308445 | CCGTCACGAACAGGATTCGAACCTGTGCGGGGAAACCCCATTGGATTTCG | | | Mouse | | | |
| 2140 | cg13544184 | CACTGAGGCCGTGGATCAGGGGGGCGCTGTTAGACCTCCTGAGGCCCCCG | | | Mouse | | | |
| 2141 | cg03475710 | ACTTTGCTGACAGCTTGTCACATTTCACTGACTGTCTGTCTGGGGTACCG | | | Mouse | | | |
| 2142 | cg18673669 | CAACTCCACAATTACCTTATATTTAATTAATATTTTTTCTCCTCTTTACG | | | Mouse | | | |
| 2143 | cg09711113 | AGAGGTTGAGGTACAGGCAGTCCTCGCTCTGGTTCTGCACGTAGGTGGCG | | | Mouse | | | |
| 2144 | cg20960545 | CTCCCCTTCAACAGGATGTCTCTCAGCTCGGGCGACATGAAGTAGGGTCG | | | Mouse | | | |
| 2145 | cg24798730 | CGAGTTCTTGGTGAAAATGCAATTGCTGTTCGAACAAAAGCCATGAAGTG | | | Mouse | | | |
| 2146 | cg10316601 | TGCATGAAGTATAATGCTAAAGACACAATTTTCCACCGAGCAGCTGTCCG | | | Mouse | | | |
| 2147 | cg21128693 | CGTGTGACAAAAACAGACACTTACTGCCGTAGGGAGAGTTAGCGGAGGAG | | | Mouse | | | |
| 2148 | cg09660031 | CGTCCATTTATCTGATCCAAGTGCTCTGAAAAACTGCCAACTGTACAAAG | | | Mouse | | | |
| 2149 | cg15416058 | GGCCTAAACACAATAGGACTCGCCATTTTCTCCTTGTGAAGCACAAAGCG | | | Mouse | | | |
| 2150 | cg21830760 | AATGTGCCTACCCATCGCTGTTGCTCCTTGCAGCCTGCGGGTCCTCTTCG | | | Mouse | | | |
| 2151 | cg21913180 | TGCTCAGCCTGTGCCTTGAACTCGGTGGTGCAGAGCGTGCTGAGCAAGCG | | | Mouse | | | |
| 2152 | cg07240567 | TGCGAGGAAGATGGGTTAATATTCTGTGCATTCTTTGCCACCTTCATTCG | | | Mouse | | | |
| 2153 | cg22359606 | CGCCATATGGTCTTCCCGGTCCAGCCAAGAGCCTGGAACCACGTGACCTG | | | Mouse | | | |
| 2154 | cg06075167 | CATCGATATCCACAGCTGCAACCACGAGGCTGAGAAGCTGGGCTGCAGCG | | | Mouse | | | |
| 2155 | cg12906435 | CGACTATTTAATGAGTCATTCAGCCAGGATGATTTTCTGTCTGAATATGT | | | Mouse | | | |
| 2156 | cg17696796 | CGTATCCCCCTGCGGAGACAGGTAACAGAAAGTAGATAAAGAGTTTAAAG | | | Mouse | | | |
| 2157 | cg16091716 | CGCCGAAATTGAATGCATCGTTTCTTAATAAATCCAGGCCTGGACTCAGA | | | Mouse | | | |
| 2158 | cg14705908 | ATACTGAGGGTTAGTGGACCGTGTTACATACGTCACAGATAAAGCGTACG | | | Mouse | | | |
| 2159 | cg14894602 | CGGCATCATGAAGCAGAATTAAAGTAGGCATCTGTGTTCTCCGGCATTAA | | | Mouse | | | |
| 2160 | cg21658772 | CGAGGTACCGAGGAAAACAAACAATGGATTGTTACAGTACATACATTCTG | | | Mouse | | | |
| 2161 | cg01190601 | CGAGGGAAGACAATCTGCTTCTCGCATTATTAGACACGCTTGGAGTTCAG | | | Mouse | | | |
| 2162 | cg26603448 | CGAAGTGTCTGCAATGAACCCCGTGAATGCTACTGCTCTCTACATTTCCG | | | Mouse | | | |
| 2163 | cg26572218 | CTAATTGAAGTGACGGCTTTGGAGATTATGGGGAACATATGGCCCTACCG | | | Mouse | | | |
| 2164 | cg16812753 | CGGGCAGATTTATTCCGCTGCCAAGCCTGCAGAAAATTGACTTGTTCATG | | | Mouse | | | |
| 2165 | cg23745624 | AGGAGGGCGAGACCCCCGGCAATTTCATGGAGGACGAGCAATGGCTGTCG | | | Mouse | | | |
| 2166 | cg24694549 | CGCACATACCAGGAGAAAGGTAGTCCCAGTGGGGAGTGACAAAGCTTAAT | | | Mouse | | | |
| 2167 | cg25836134 | CTTTGAATGCTTATAAAACTCCACATAAAATCGGACTGACCCAAAACACG | | | Mouse | | | |
| 2168 | cg19860820 | GTGAAAGAGGTCAACAGCGGTTTAACACTTTGGTTCAAGCAAGGCACTCG | | | Mouse | | | |
| 2169 | cg25295558 | CGCCTGAACCTGAAAGGACAAGGGCGTCACGTTGCAATGACTATCCTAGG | | | Mouse | | | |
| 2170 | cg27070413 | TTTAGGGGGTTGGCTCCTACTCTGCTAGGACTGTGTGCGCGGAGCATGCG | | | Mouse | | | |
| 2171 | cg24813264 | CCTTGCCGCAGATGGTGGTCTTGTAGTCGCCAAAGATCTGCCTGACTGCG | | | Mouse | | | |
| 2172 | cg06582198 | TGCGATGCTAATGGCAGGTGCCTCTTGGCAGCACTGACCATGGACAATCG | | | Mouse | | | |
| 2173 | cg27278067 | CACTAGCAGCCACAGCCTTCTCTCTGGGGTTGGGGTTCACTGGTTAGCCG | | | Mouse | | | |
| 2174 | cg01667686 | CGGGTGATGATCACGTCTATGAAGTTAGCTGCAGTAATGGTAGTCTTCCC | | | Mouse | | | |
| 2175 | cg21539484 | TATGATGAATTATGGAAATGACTGGGACATGTACTTGGTTCCCTCCTACG | | | Mouse | | | |
| 2176 | cg18298247 | GATCCACAAGCTCTTGCCAAGGCTGTACAGATTCACCAAGATACCTTACG | | | Mouse | | | |
| 2177 | cg02456288 | CGTTGGCCAAGCACAATTGTGTTATTGGAGATAATGAATTCAATCCCCAT | | | Mouse | | | |
| 2178 | cg16492924 | ACTCAGCATTTTGAAAGATACTATTTTTCACAAATCACAAATGGCTTTCG | | | Mouse | | | |
| 2179 | cg08191552 | TTCATGGCCATGTAGTGACCCAGCTTGGCGCTCTGGATGGTGACCACACG | | | Mouse | | | |
| 2180 | cg08122075 | TTTCACTTTTAATCAAGCTTCCTGTTGTAAGAGCTCAGCAGACAGTGACG | | | Mouse | | | |
| 2181 | cg27450153 | CGAGCCCACTGTTGGAATAGTTGCTGATGGGGGACTGTTGGCTGCTGCAT | | | Mouse | | | |
| 2182 | cg17026002 | TTCCTGACAACCTTCTACAGTTATTGACATTACAAATACCAGCAACAACG | | | Mouse | | | |
| 2183 | cg24479261 | CGGACCTAAGACCGGGAACACAAAACAGAGAAAAAAGGACAATTTTGTGG | | | Mouse | | | |
| 2184 | cg08121938 | CGCCAGCTGCAGGTCCAGGATGTAGTCGATAACGTGCTGCAGGATCTCCA | | | Mouse | | | |
| 2185 | cg09084634 | CGATGATCTTCATCTGCTGGTCGGAAGGGCTGTGGAATTGGAATGGATTT | | | Mouse | | | |
| 2186 | cg09349243 | TTCTCTGGGTTCCTCGGCCCACCATTCTTGTTCAGTCTTACCAGAAACCG | | | Mouse | | | |
| 2187 | cg05166684 | CGTGCAGACCCTGGTGCATCTCAAGTTCCCCACAAAGGTGGGCAAGGCCT | | | Mouse | | | |
| 2188 | cg18881373 | ATTGGACCGCAGCGCTGAGAGCTTTTGTGTTTAATGACCTTCAGCTACCG | | | Mouse | | | |
| 2189 | cg12185545 | GTTCCACTCCAGTGCCCTCCCCAATAAAACTTTTCATATCCTTATAAACG | | | Mouse | | | |
| 2190 | cg03178974 | CGGGATTATACCGCTCTGTGCAGGCCCACAGGAATCAAAGTCGGAGAGAA | | | Mouse | | | |
| 2191 | cg05010174 | GGACGTCCCAAAGACAGATATACTCATATGTAATCTGCAAGGCACATTCG | | | Mouse | | | |
| 2192 | cg06600911 | CAAGTATTTAAAACCTCTAGAAACCCATGATTTGACAATCAATGATTGCG | | | Mouse | | | |
| 2193 | cg22621796 | CGGCTGCCTTTAAATAGTCCGATCTATCAGAGGGGCACACGCTGCCCATA | | | Mouse | | | |
| 2194 | cg08097199 | CGGCCCTTGGAGACTTCCCGCTTCACCAAGCTGCTGCTCAAGCTGCCGGA | | | Mouse | | | |
| 2195 | cg19923477 | CGAGACCACTTGTAAAAGCAATAAAGCACAAGGAGTGACTGCAGTAAGTG | | | Mouse | | | |
| 2196 | cg08778230 | CGCCACCTTTTAATCTTTTGTAAGAGTGAAAAGGCAGAAAAGGAACGCTC | | | Mouse | | | |
| 2197 | cg12503970 | CGCTACAGCACTGGATTAGCTGGAAACCTCCTGGGAGACCTACATTACAC | | | Mouse | | | |
| 2198 | cg20380871 | TGATCTGCTTCCTGGAGAACTCCTTGAACTCGGTGTAGGGGTTGAAGACG | | | Mouse | | | |
| 2199 | cg21853871 | CGCATTAGCGGACACTCTATAATAGTGGCATTTATTAAGAGACCTGTTCT | | | Mouse | | | |
| 2200 | cg09137804 | CGGGGATGATCTGGGTTCCGGGGGAAGTGGAATTATTTTTTACCAGCGAA | | | Mouse | | | |
| 2201 | cg26339573 | TCTGTACAGTGTCGACAGTCTGTAATGCCTTTTTAGCATGAATGACAACG | | | Mouse | | | |
| 2202 | cg21164975 | CGGATGACCAAAGACCTTTCTTATGCCGGAAGCAAAAACCAAAACTTTTT | | | Mouse | | | |
| 2203 | cg23602865 | GGTCAGGAGAATGTACCATTTGTAAACACCCCTTTCCTTTTTTATTCACG | | | Mouse | | | |
| 2204 | cg18178230 | TGGAAGTGATGTGCAAGGCAAGAGATAACCAGGTAGAACTCAGCGATTCG | | | Mouse | | | |
| 2205 | cg26518080 | CTATCCGGAATATTTTGGATTCTTTGTCCTCCCATCGGATGAAGTTTTCG | | | Mouse | | | |
| 2206 | cg15136978 | CGTGGCCAGGAACCTCCGCATTCACATGACCAGTGAGAAGCACATGCATA | | | Mouse | | | |
| 2207 | cg27039984 | CGGCTCTATGACGATGCCATTGGTAGAATTATTTAGTTCTCTGGAGACAA | | | Mouse | | | |
| 2208 | cg21474259 | CGTCCCATTCAGCTTCTCCCGGGCTCGGTCAGCATCTGAGCTAGTTTCAA | | | Mouse | | | |
| 2209 | cg26640686 | GCATTTGTAACGAATTTCCGTTCGAGTTTGTATTTTAGGCGCCATTTTCG | | | Mouse | | | |
| 2210 | cg21472737 | CTCGTTCTCTCCTCCGTTGCAGATTGAAGTAGTCAATACTTTCAAGAGCG | | | Mouse | | | |
| 2211 | cg07117806 | CGCCCTAAATCACTGAGGCGGTCAGAGAACAAACTAGGTTTAGAGTCATC | | | Mouse | | | |
| 2212 | cg02496392 | GACTCTGTGACACGTGGAATAAAATCACGCTCCCATAATGGGATCATTCG | | | Mouse | | | |
| 2213 | cg11145593 | AATCTGAATCTTTTTTCTCCCCATAGTCCCCGTTTTTCTTCTCTCTCTCG | | | Mouse | | | |
| 2214 | cg10239342 | ACAGGTGGCTTCCAGACCTTCAACTTCAAAACAGTCCGTCAAGGTCAGCG | | | Mouse | | | |
| 2215 | cg16895245 | TCAAAAGAGTGCATAAATGAAACAATGTCCCCAACGGGGTCAGTGACCCG | | | Mouse | | | |
| 2216 | cg08981194 | GCTGTGCTGGTGATCACAAGAAACAACAGCAATCTGTTGAAGATCAGACG | | | Mouse | | | |
| 2217 | cg17247426 | TTAGTTGCGTTGAGTCATCAGGCAAAGTGAGTCCTTTTGGGTTGTCCTCG | | | Mouse | | | |
| 2218 | cg17625993 | CGGTGATACATTTTGTACAATAATTAGTTATTTGATTACTTTTGTTTTAG | | | Mouse | | | |
| 2219 | cg22723228 | GCTATTTTTGATGCAATGTTCTTAAAGGCAATAGATGTCCCAGATATTCG | | | Mouse | | | |
| 2220 | cg02376954 | ACCTTGATTCACTCTTCGTCGTTGGCTAGGTTTTGGATTTATTACTTTCG | | | | Rat | Human | Universal |
| 2221 | cg03942000 | CGGGCTGGCCAGGCAGCTGCAACCTGCGCTCAGGCAGCTCTTAAAGACAT | | | | Rat | Human | Universal |
| 2222 | cg25381383 | AGCAATTAAACAGTTTGATTAAATGAGCCATCATAACAATGATGTCTGCG | | | | Rat | Human | Universal |
| 2223 | cg04958293 | CGGCCTTGTGTCAGCAGGTCATGGTCCCTAGAGACTACCTAGTTGTAGTG | | | | Rat | Human | Universal |
| 2224 | cg16356803 | CGGTCGCAAATGGTTTGACTAAACGTAGGATGGGACTTAAGTTGAACGGC | | | | Rat | Human | Universal |
| 2225 | cg16486681 | CGTCAAGTTTACTCACGAGTTTACTCAGCACAAGGAGGGGGAAGAGGCCA | | | | Rat | Human | Universal |
| 2226 | cg27088374 | CATACCTTATAAACTCTTCTCCAATTCTTTTTGTTGTCTTTTAACATTCG | | | | Rat | Human | Universal |
| 2227 | cg18094982 | CGTGTGGCCTTAAACTTGCAGCAAATTGCAAAGAAATGGCTCAAAAGCTT | | | | Rat | Human | Universal |
| 2228 | cg14155184 | GTGCGTCTTCACGGTGGTCATGACCTACAGTATCACCTGCCCCATCATCG | | | | Rat | Human | Universal |
| 2229 | cg19591642 | CGTGGCCAGCCATCTCCTATTGAACCTGGAGGACTGGCTGGTGAAGTACT | | | | Rat | Human | Universal |
| 2230 | cg21815434 | ACTCCCTGCAGAAGACGTACTCGGTGTAGCTGGTCCAGATCTTGTCCTCG | | | | Rat | Human | Universal |
| 2231 | cg27299745 | ATTCCCTCACTCGACTTTTCCCTAATGAGTTCGCTAACTTTTATAATGCG | | | | Rat | Human | Universal |
| 2232 | cg00694357 | CGGTGTCCCAAACTAGGTCAGCAGCGCTCGTTTCCTGTGGGTCAGCTAGC | | | | Rat | Human | Universal |
| 2233 | cg00929113 | TCTCCTTCAACTAGACGCTTATTCATGTCGCCTTAATGAGAAACAAAACG | | | | Rat | Human | Universal |
| 2234 | cg01063757 | AGGATCTTCAGTGAGAGACATTATTCTTGGAATATCCAATTAATTCCACG | | | | Rat | Human | Universal |
| 2235 | cg02456804 | CGGAGAACCTGGAGATCTTGTTGGTGGGGCCAACCAGGGTCACAGTTTCT | | | | Rat | Human | Universal |
| 2236 | cg03222030 | GGTTGGCCGTTTGCTGCGTCTAGGGGTGTTCTATGTAGCGCAGCAGTTCG | | | | Rat | Human | Universal |
| 2237 | cg03521797 | CTAGGAGCCTAGGCGGCACTGTTCCTTTGTCCCCTCAGCTCATCTTCACG | | | | Rat | Human | Universal |
| 2238 | cg05008190 | ATGGGCGGGCAGGACAACACGGCATGGAGCAGCTCCACATGGACACCCCG | | | | Rat | Human | Universal |
| 2239 | cg09629523 | GCCCTGAGCTTTTCTGGGTGTGTGTGACAAAGGCTTAATCTGTCCGGACG | | | | Rat | Human | Universal |
| 2240 | cg10487127 | CTCCACGGGGCTTGTTTTGGATCCCCCTGCAGTGAAACAGGTCCTGTACG | | | | Rat | Human | Universal |
| 2241 | cg10644072 | GAGCGGCAGGGGCATGTGGATACTGGCTCTCTCCTTGTTCCAGAGCTTCG | | | | Rat | Human | Universal |
| 2242 | cg11541320 | CGTTAATGTAATCAGCAGTGTGCGAAATGACTGCGCGGAAAATAGCATCA | | | | Rat | Human | Universal |
| 2243 | cg11690941 | TGATGCTCAGTTGTCAGACTACCCTTCTTTGGACTACCAAGGCCTCTACG | | | | Rat | Human | Universal |
| 2244 | cg11803466 | CAGGCGGCCTCTTTTGTTTATCTGACAGCTAAATATCAAGGCAATCACCG | | | | Rat | Human | Universal |
| 2245 | cg11997199 | GGCAGCAAGCCCTACAAGTGTGACGAGTGCAGCTACACCAGTGTCTACCG | | | | Rat | Human | Universal |
| 2246 | cg15597031 | CGTGTTGCGCTTTCATCCAATTTTCTGATGTGTTTTGGTAATGATGTTGA | | | | Rat | Human | Universal |
| 2247 | cg16296826 | CGCTCCCCCTCTAATGTGTGATCTGGAAGCTCTATAAAGCCTGATGTAAT | | | | Rat | Human | Universal |
| 2248 | cg16391501 | CGCTGCGCAGCTGAGAGCCTCGGCTTAATCTTATGCACCATTAAGCACTC | | | | Rat | Human | Universal |
| 2249 | cg17425418 | GGGCTCATTGATGGCCTTACTAAGTTTTTTACACCATCACCTGATGGTCG | | | | Rat | Human | Universal |
| 2250 | cg19414994 | CGAGTGCCTTGAGCCTGAGCAATGTAGCAGGCGTCTTCTACATTCTGGTT | | | | Rat | Human | Universal |
| 2251 | cg19854621 | TTTTTCTTTCTAAGCTGAGCACGTAGTCTGTTCAGAGCTTGTTTCTTCCG | | | | Rat | Human | Universal |
| 2252 | cg20896439 | CGGTTGTCCTGCCATAAGTAGTAGAAAGTGCCCAGGATCCAGGCTACGGT | | | | Rat | Human | Universal |
| 2253 | cg22588813 | AGGTCTCTCTGTTTGGCTGGGGGTCCTCCTCCACTATCTGAGAATCCACG | | | | Rat | Human | Universal |
| 2254 | cg22866580 | CACAATAAGTCAAGGTCATAAAACAGTAATGTCAGGACGGTCTTGGTGCG | | | | Rat | Human | Universal |
| 2255 | cg23405931 | TGTGAAATGGAGCTGTGTATATTGAAATTTCTTTCTCCAAAAACAGAGCG | | | | Rat | Human | Universal |
| 2256 | cg25217825 | CGATCAATGGCTATCAGCAGTTCTTGTGAGAGGGCAGAATAATTTGATGG | | | | Rat | Human | Universal |
| 2257 | cg26120306 | CAAACTGGTTGTTAACTGTGATAACAACTGATTTCAAGGGGTTATTGCCG | | | | Rat | Human | Universal |
| 2258 | cg26845017 | CGCGGAAGGTCTCCGGCGAGGTCTCCATTACTAATAGAAGTTTTTTGATG | | | | Rat | Human | Universal |
| 2259 | cg27291552 | CGGCTGTGGGTCACATTCATGTGTTTCTCCAGGTACCAGCGGTTGTTGAA | | | | Rat | Human | Universal |
| 2260 | cg04243635 | CGTCTCATCGCAAAGTAAATAAATTATGCCTATCATTTTGGCAGCTTAAG | | | | Rat | Human | |
| 2261 | cg05775627 | TGCAGCTTCTTGAGGAACTCAATCTCATCCATCAGAGACTCAATCTTGCG | | | | Rat | Human | |
| 2262 | cg11134720 | GCTTGTTACCTGGTCATCAGTTCGAGACATCTCAGCAATGGGCACTACCG | | | | Rat | Human | |
| 2263 | cg02129856 | CGCGGGAATGGCAAATATACTATTTGTCTAATGGCTCGGCAATTAAATTC | | | | Rat | Human | |
| 2264 | cg25445920 | ATGGCTGGGGCTGCCTCTGTACAATGGGATAAAATTCAAGTTCAAGTGCG | | | | Rat | Human | |
| 2265 | cg16435898 | GACGGGTCCAGCATCCAGTAGTTGCCCTTGCCCGGGTCGTCGTAGTGGCG | | | | Rat | Human | |
| 2266 | cg08333796 | CTGGCTCCCGATTCGGGATCCAGTTTCAGAGAGCGAGAGATTGGGGAGCG | | | | Rat | Human | |
| 2267 | cg10187298 | CAGGATGGATGGGGGGACCGACAGCCGCGGAATCCCTAATAAAGGCCGCG | | | | Rat | Human | |
| 2268 | cg04276865 | CGCTGTCGTCTCTGTTCATATATATTTAGTATTTATTTACAAGGCTGGGT | | | | Rat | Human | |
| 2269 | cg14467787 | TGTCATTCATCAAAAAGTAGCGCCCGCTCGTCATTAAGGTACGAATGACG | | | | Rat | Human | |
| 2270 | cg09129254 | TCACAGCTCGGAGTGAATGGTGTTTCTGGGATACCACAGCAACCTTGACG | | | | Rat | Human | |
| 2271 | cg03751003 | CGCCAACAGCCTTAAAACTTGCCACAGTTGCTGCCAGTATGGACAGAGTG | | | | Rat | Human | |
| 2272 | cg14188130 | TACCTTCCTTCTCCTTCCCTACAATTAGGACAGGAACAGGCAACTCTTCG | | | | Rat | Human | |
| 2273 | Cg07082738 | CGCCCCTGCTCATCCATGCTAGCCTGGTATTGCAGCTGCAGCTCCCGCAG | | | | Rat | Human | |
| 2274 | cg20315951 | CCGGTTCGACAGGTAACAAATAGGTGGGTTGTCACCGTTATTTCCCAACG | | | | Rat | Human | |
| 2275 | cg27393099 | CGCCAGGCAGTGAAACTTAATAGCAGGACAAGAAAACGGTTTAATAAAGA | | | | Rat | Human | |
| 2276 | cg17063148 | CGCTGTAGACAGCGCTGGAAATAATCAGATTAAGGCCAATTATGCGTGAG | | | | Rat | Human | |
| 2277 | cg12322817 | CGAATTTAGCAAATCAGATCATGGTTTAAATGCACTATTTAAAGCAGTCC | | | | Rat | Human | |
| 2278 | cg26987152 | GCTGCTCCAGGAGCCATGGCTAATCATCTTATAAGCAATGCTCTGCTTCG | | | | Rat | Human | |
| 2279 | cg24765266 | TCTCTCTTAAGTGCCATCGAGGGGCGCCGGGAATTGCAGCCAGTAAATCG | | | | Rat | Human | |
| 2280 | cg20672483 | CGCCAGCAATAAGACCAACCGCTTTGCTATTGTCCAAGTGGAAAGAGCCA | | | | Rat | Human | |
| 2281 | cg13228949 | TGTCAAATCCCCCTTAATTACCAGAGATTTTATAGCAGCTTCATTATACG | | | | Rat | Human | |
| 2282 | cg14701026 | CAGACCATTTTCATTCAGGAAAATCAATAGACAACTTACTGTGATGTACG | | | | Rat | Human | |
| 2283 | cg16184756 | CTAATTATCTCGGGCAAGATGTAGGCTTCTATTGTCTTGTTGCTTTAGCG | | | | Rat | Human | |
| 2284 | cg08275784 | CGAGAAATTTTATGGCCATAAGGAGCGTACTCTAATGGTGATTTTTGAGG | | | | Rat | Human | |
| 2285 | cg25830596 | CGACATAAAGCGTATCAAATATTTATTTATCTGGGCAACAAAGGACTATG | | | | Rat | Human | |
| 2286 | cg18440245 | GATTTGTGGATAAGCCTGAAGCAAAGTCAATGCTCGGTGTCAATCCCACG | | | | Rat | Human | |
| 2287 | cg24203137 | CGGGGACCTAATTCCAGGCCCAGGATCGAATTTTCTGGCAACAAAGGGAA | | | | Rat | Human | |
| 2288 | cg22527167 | CAGCCAAGTAGACTTAAAGTAGTCACTTATTTCCCAAAACTGGTTTGTCG | | | | Rat | Human | |
| 2289 | cg07116247 | CATCACCTTTAACCGCTACAGCCATGATTTCAACTTCCACATCAACTACG | | | | Rat | Human | |
| 2290 | cg26451479 | ACAGGAGCACCTCCAGCACGCAGCAGGGGAACTTCATCAAAGTCAGGACG | | | | Rat | Human | |
| 2291 | cg05927178 | TCAAAATGCAGGTTGGAGTTTTGACATTCCTGCAGGCTCTGAACGCCTCG | | | | Rat | Human | |
| 2292 | cg00393367 | CGCCTGGGAACTGCAGCAAATGGGAGAAGTATGCATGGATTTCACAGGTA | | | | Rat | Human | |
| 2293 | cg17466139 | CGCCTACAGTTTCGTTTCCATTCACGACGCGTTCACTGATCGCCACGAGT | | | | Rat | Human | |
| 2294 | cg02506421 | TTCTGTTGCAGGGACTAGGCCCTGGCCAGGCCCCCGAGGTGGCCCCCACG | | | | Rat | Human | |
| 2295 | cg25539759 | CGCATCATGGAAAAGCAGTTGCTCGAAGAACTCGAGCGACAGAGACAAGC | | | | Rat | Human | |
| 2296 | cg00994804 | CCTAACTCAATCGGCTTGTTGTGATGCGTATCCCCGTAGATGCCAGCACG | | | | Rat | Human | |
| 2297 | cg08438560 | CGCACAAACCTGACCAGCAGCGCAGAGGAGCCGTGGAAAAACCAACTATC | | | | Rat | Human | |
| 2298 | cg12203266 | CGAGGTGTAATCATTCTGGTTGAGAGAGAAAAAGATTAAGAGGGTGCAAC | | | | Rat | Human | |
| 2299 | cg18289982 | CGTGAGAATAATGAATGTGGAAATACAACTAAAAACATGGCACTCAAAAC | | | | Rat | Human | |
| 2300 | cg08000413 | GACAGCTTCAACTTCTTCACCAGAGAATCTCTTGCGGCTATTGAAAGACG | | | | Rat | Human | |
| 2301 | cg13219248 | CTAGCCAGCAGCAGAGACAGATGGCAGAGTTATTAGATGTGCATCATACG | | | | Rat | Human | |
| 2302 | cg04586876 | CGTGTCCAGAGGTCTCTTGTGGAACATTTCTACAGCTGTCTCCTTCAACT | | | | Rat | Human | |
| 2303 | cg00046033 | TTATCATTCGGAAGCTTTAATTCTATTGAAATGGCAGCTGCTCAGCTCCG | | | | Rat | Human | |
| 2304 | cg26048456 | TTCCCACTGTCTTCATCTGTGGCACTAATAGTTGTTAAGTATAACCCACG | | | | Rat | Human | |
| 2305 | cg24117712 | CGGAGGAAACGAGGAAAACTTGGGAATTTCCCGTGCTCCTGAAATATCTC | | | | Rat | Human | |
| 2306 | cg23705797 | CCATAAGCCGTCACTTATTCATCTTAATTTCAACAAAATTAAAGTAGTCG | | | | Rat | Human | |
| 2307 | cg02507211 | CGAACTCCCAGTTTTTGTTAGGGGCATAATCCCATTCTACTTCTTCAGCG | | | | Rat | Human | |
| 2308 | cg01066008 | CCTCCGGGAGGTTTCGTTTTTCCATTGAAGTCCCCCTGATTTACTGTACG | | | | Rat | Human | |
| 2309 | cg03533765 | CGCTGCAGGATGATAGTGACTTCTGAAATTATCACAATTATCATTCCATT | | | | Rat | Human | |
| 2310 | cg14650619 | CGGAGCTTTGGAGAGATGAAGTTTAAACAGTGTCCTACAGAGAACATGGC | | | | Rat | Human | |
| 2311 | cg01756262 | GCAAATTAATACATATATCAATTTTGTCAGAAACATGCTTAGTTCAATCG | | | | Rat | Human | |
| 2312 | cg01885247 | ATGGTTACCTGTTCAGCACCGATTCAAACTGCCGTTCTTTATTGACAGCG | | | | Rat | Human | |
| 2313 | cg02979795 | CGCCCGGGCTGCCTGTTCCAATATTAGATATAAACAAGTAAACTGTGTAA | | | | Rat | Human | |
| 2314 | cg17314023 | CGGACAGAGTCCAGATGGCTGTTCTACCGTTATGTTTCCCAAGATAATGG | | | | Rat | Human | |
| 2315 | cg20118823 | CGCACCTGCTGCTCCAGCCCCAGGATGACCTGCACGGCCTGCTGCAGGAT | | | | Rat | Human | |
| 2316 | cg18522824 | CGTGCTGTCGAGAGAAAGGTGGATCCCAACAACAGGAAACTACCTAAATC | | | | Rat | Human | |
| 2317 | cg18897683 | CGCATTGCGCAGGGTGCACCACCGCTTGGTCTCCCTGCAGCTTTAACAGC | | | | Rat | Human | |
| 2318 | cg18937321 | CGCCCAGGTGGCTTTCTTAAAGGGAAAGTTGCATCAGCCTCCCGAGGCTC | | | | Rat | Human | |
| 2319 | cg12743193 | AGGAGCTGTGGGTGCTGATCTGGCTGTACTCGCAGTCTTTCATGGGCCCG | | | | Rat | Human | |
| 2320 | cg24966735 | CGGCCCACCCTACATTTAGCGCATCATGTGATCCGGGTAAGTCATTTGCA | | | | Rat | Human | |
| 2321 | cg12934146 | TTGGGTACCCAAGCTGGCTTTTGTACTCTTCGGAGCTTCCTTGTTCAGCG | | | | Rat | Human | |
| 2322 | cg19839218 | CGTGAGCCCAGATCCGGACGAGCAGTTCACATTCCATTACGAAATTCTAC | | | | Rat | Human | |
| 2323 | cg19895248 | CGACTCAGCAAGGTCACTGTTCAGACTTGACTCGTGATTGGCTGCTGCGC | | | | Rat | Human | |
| 2324 | cg22262485 | CGAGTGATTTATGACTTCAGTCTTGGTTCACCAAGAGTTCACACGGCTTT | | | | Rat | Human | |
| 2325 | cg26450215 | GGAAATCATGCCCATGAATATAGTTTCCATCATTTCACCCTTGATAGACG | | | | Rat | Human | |
| 2326 | cg21375168 | CGAGATGCAATAATATTTGTGAACATGTTAATATAAAAAATGAATTTAAT | | | | Rat | Human | |
| 2327 | cg22040516 | CGGGATGCTCGGACTGCACAGAGCCACCATCAGGCAGCAGGTGACCAGGA | | | | Rat | Human | |
| 2328 | cg18253120 | TCAACTAAGAAAATACAGAGTGAACCATATGGCCTGGGTGGCTCGAGTCG | | | | Rat | Human | |
| 2329 | cg25565338 | TTCACAACCCCCTGAAAGCGTAAGTAAGACTAAAAAATGTACATATTCCG | | | | Rat | Human | |
| 2330 | cg22616024 | TTAAAAGAATCTTTATATTTCATTAAGCAAGCAGATCGGCGGATCTCCCG | | | | Rat | Human | |
| 2331 | cg22608267 | TGGAAGAGATTCTGCATTACTACACCTCAGTGCCTGCCTGGTTCCCTTCG | | | | Rat | Human | |
| 2332 | cg00056578 | GTTCGCACTGCTGTAAGGCTTTTTGCAAACTCAGAGGCTGCTGCTCCTCG | | | | Rat | Human | |
| 2333 | cg00075753 | CGCGGCAGACCACCCACGCCGAGGGCCATGGAACTGCTTAATAGAAACAG | | | | Rat | Human | |
| 2334 | cg00095474 | AATTAAAAATTCAAACCTTGTGTATATTTGAAAGCATGAATCTTAGCTCG | | | | Rat | Human | |
| 2335 | cg00116653 | CGATTTAGGTTTTAATTCCGGGGCTTTTGGAGCCTGTCAGCCCTGATGTA | | | | Rat | Human | |
| 2336 | cg00138195 | ATTAGGCCGCAAATCGCGCTGAGCCTCCCTAAGTGACAGCGAGAGAATCG | | | | Rat | Human | |
| 2337 | cg00166579 | CGGGCAGCGGCCGCAGCAGCTCCTTGATTCAATAGATGAGATGGAAGAAG | | | | Rat | Human | |
| 2338 | cg00170518 | TTACTTGCTTTAACTTCATACGGTCCACAGTGAAAGAGTTCATTCAGTCG | | | | Rat | Human | |
| 2339 | cg00187380 | ATGACCAAACTGCACATGAGCCACGGTAAACTTTAGGACTTCATTTTGCG | | | | Rat | Human | |
| 2340 | cg00236139 | CGGGTGTCTGACAGCCGGACAGCGGGATCTGCACAGCAAGTGAAATTCCC | | | | Rat | Human | |
| 2341 | cg00281640 | CGTGCTCATACGAGCAAAGGGCCCGGGCCATATAGTCCCAGTGTCCAGTT | | | | Rat | Human | |
| 2342 | cg00323965 | CGCGCCACCTATCTTTGTGGGGAGGGATAATTGAAGCGCCCTGAGCGTGA | | | | Rat | Human | |
| 2343 | cg00379872 | CGCACCAATAAAAATAATTGTGCAAGCCTAAATTTGGAAGTGTTCCCAGC | | | | Rat | Human | |
| 2344 | cg00386839 | CACAAGCAAAGAAGCATGTCCCATTTAAATACACCCACGCAGCCCCAGCG | | | | Rat | Human | |
| 2345 | cg00411555 | ATTTTTTTTTAAGCTCTGAGCTGTCAACGAGACGTTTCCTACCGATCTCG | | | | Rat | Human | |
| 2346 | cg00427623 | TTCTTTTCTTTCAACACAAAAGTTGGGTTGTGAATTTTCCGAGGTCGCCG | | | | Rat | Human | |
| 2347 | cg00487538 | TTTCTGAGGTTTAGTGAGTTCGATTAGCCGCGTGCTCAGAATCAAGTTCG | | | | Rat | Human | |
| 2348 | cg00490620 | CGCGGCGGGCTGAGTTTTGAAAACTTAGGATTCTAAATGTATAAATTGTT | | | | Rat | Human | |
| 2349 | cg00531009 | CTCCCATGGACCCTTCTAACTTTGTCACCATGATGGGCATGGGGGTGGCG | | | | Rat | Human | |
| 2350 | cg00553911 | AGGGCTGCTGCAGGTGCGTCTGCACGTGGGACTGGCAGCAGGGCGCCTCG | | | | Rat | Human | |
| 2351 | cg00571722 | ATCCCTCTGAAGGCCTTTAACTCCACCTGTGACTAACCCATTCATAATCG | | | | Rat | Human | |
| 2352 | cg00578263 | CACGATGATGATAATTGTAATTAGAAAGTGCCTGGCAATTTCTTATCACG | | | | Rat | Human | |
| 2353 | cg00591406 | GAAATTGTCCTTTGATTAAAAAAGATTCATCACCATTTCCAGCTCTGTCG | | | | Rat | Human | |
| 2354 | cg00716372 | CGCAGGACTTCCATGTCTGAGGGGATCAAGCAGCTCTTGAAAGATATGTT | | | | Rat | Human | |
| 2355 | cg00857360 | ATCTGTAGTTCAATTGTAAATTAGAATACACATCCCCCCAGGGACACACG | | | | Rat | Human | |
| 2356 | cg00902440 | CTTTTCAATGTATAAAATGGAATATTCTTACCTCAATTCCTCTGCCTACG | | | | Rat | Human | |
| 2357 | cg00959147 | CGCGCGGCCGAGCCCCACGCAGCCGCACAGACGTAGTCCACAACCATTTC | | | | Rat | Human | |
| 2358 | cg00967479 | GTGGGCAATTAGGCAGAACTTTGTTTGCACTGCCTCGGAAAATGAAACCG | | | | Rat | Human | |
| 2359 | cg00971828 | CGGCTTACTGAACATTCCAAATGCTGGTACCATGTAATTGGACATAATAG | | | | Rat | Human | |
| 2360 | cg00975228 | ACTTTGGCTGCTCAGTTGCATTTCACAGGAACCTAGATATCGAATCCTCG | | | | Rat | Human | |
| 2361 | cg00993893 | CGGAGGGAAGAAAAACTAAATTCACTTGTGAGGCGATTTTATGGCAGAGC | | | | Rat | Human | |
| 2362 | cg01016328 | TCAGCATCATACACCTGACCTGGGGCCACAGCTGGATAAAGAAAGTCACG | | | | Rat | Human | |
| 2363 | cg01096459 | TTCCTTTTAAGATTCTCCAGAAGGCTGCAAGGCCAGAACCACAAATATCG | | | | Rat | Human | |
| 2364 | cg01097631 | TTAGTTACTTTCCCACTTTGAGGTTAAACAAACCAGTGAATGGGACTCCG | | | | Rat | Human | |
| 2365 | cg01127764 | CGATCGGAATGCCAATAAAATCGATTAAAGGTTTAGTGTTTTACAAACAA | | | | Rat | Human | |
| 2366 | cg01267365 | CGGCATGAACGCGGTGCGGACGTGGATGCAGGGCGCCGGGGTGCTGGACG | | | | Rat | Human | |
| 2367 | cg01275157 | ATTTAGAGTCATTTAATCTACTCAATTTGCACGTTAATTAAACAGCATCG | | | | Rat | Human | |
| 2368 | cg01319626 | TGAGGTAACTATAAAACCCCGATTTGTTTACATTCCCTCCCCCAGAACCG | | | | Rat | Human | |
| 2369 | cg01324452 | GGAAGGCGATGGCCATGTTCATCTCCAGCATCTGCAGCAGGTCCACTGCG | | | | Rat | Human | |
| 2370 | cg01340046 | AAACCGTTTTCCACTCATTACAACAACAGTGCTGGATTTATTCTAATGCG | | | | Rat | Human | |
| 2371 | cg01343642 | ATAAAGCCACCATAAAATGTGAGACTTCTCCTCCTTCCTCACCCAGGACG | | | | Rat | Human | |
| 2372 | cg01343704 | AGGCCAAGGGCATAAAGCCCAATCTCGAAGGCGCAAAGGTGCAGGTTGCG | | | | Rat | Human | |
| 2373 | cg01476234 | CGCCATCTTACTGACTGGTCTGGATATATGTTCCTGGAAGAATGAGCCCT | | | | Rat | Human | |
| 2374 | cg01526505 | CGGCTGACAGATGACCATATGACACCCTTCAGACAGTACAGTATGTCACT | | | | Rat | Human | |
| 2375 | cg01533729 | ATGAAACTATTAAACCCGGGTGGAGGTCAGGCTGGAGGCGCCCCAGAGCG | | | | Rat | Human | |
| 2376 | cg01538162 | ACCCTTCTAACTTTGTCACCATGATGGGCATGGGGGTGGCGGGCATGCCG | | | | Rat | Human | |
| 2377 | cg01579422 | CGGATGAAGAAACCCAGGGCCATGCTCCTATTAATACAAGAATTTGTATT | | | | Rat | Human | |
| 2378 | cg01580126 | CATCTACCACGTCGGGGACTGGCTACAAGAGCGATGTACAAGCCAAATCG | | | | Rat | Human | |
| 2379 | cg01621100 | CGCCCAGTACAGCTCGGCCAGCACCCCCCAGTACCCGACAGCACACCCCC | | | | Rat | Human | |
| 2380 | cg01640606 | ATCACGTTTCGTTATCTTTAGTGGGAATCTGCAACGTGACACCGGATCCG | | | | Rat | Human | |
| 2381 | cg01768969 | TGGCCGCCAGCCCGTAGGTTTCCTGAGTTTGAAGTTGGGCGTGCCTGCCG | | | | Rat | Human | |
| 2382 | cg01783053 | TCAGTTAACTGGTGGTAGTAGCGTTCTATTAGATGCTTTGCAGCTGCTCG | | | | Rat | Human | |
| 2383 | cg01798687 | CGGGCGCAAGTCGGGGAACAAGCCTCCGTCCAAAACATGTCTGAAGGAGG | | | | Rat | Human | |
| 2384 | cg01802683 | CGGTGCCAAGATTGCTTTAAAAAATTCCCTTGGCCCCAGTTCAAACAGGA | | | | Rat | Human | |
| 2385 | cg01855583 | CGCAGAATACACTTTGGGAAACGCTCTAAGGAAACAGAAAATAAAATGTA | | | | Rat | Human | |
| 2386 | cg01918956 | TTTTCATGTATCCTTGATAACTGTTTCATAATGAGCTATGCGTCTTGACG | | | | Rat | Human | |
| 2387 | cg01939401 | CGCTTATGGTGGCCTGGGCTCGAATCCATGTTATGGAGGGGTTTTGCCTC | | | | Rat | Human | |
| 2388 | cg02044556 | TGATGTTGCCTGCGTCCAGTGCGGCAGCCCTCTTGTCAAAGCTTATGACG | | | | Rat | Human | |
| 2389 | cg02074136 | CGGGGTGCTGAGTGCGCAATTGCCTCAAAGAAAAGTAGACAGGAGACAAG | | | | Rat | Human | |
| 2390 | cg02132378 | CGTATTTCATGTCATTATGTTGGATAATATAACAAATGATGCAATCAGAG | | | | Rat | Human | |
| 2391 | cg02157959 | AGGGCATCAGTAATCTTTGCTCAAGGGCACGGCTAACAGACAGATAGACG | | | | Rat | Human | |
| 2392 | cg02179615 | CGGGCCAGGTGGGCCTCTGACACACAGCAGGAATTTTCCACTGGCGCATC | | | | Rat | Human | |
| 2393 | cg02241397 | CGGCCATTATGGGCCAAATGATTCATTTTAATTTGGCAATTTCACCGGAG | | | | Rat | Human | |
| 2394 | cg02285385 | CGCTGGTGACTCGGGGAGCCGCAAACTTCAATTTAAATTTACAGTGCTGC | | | | Rat | Human | |
| 2395 | cg02495519 | TCACAGCTGCTCCAGAGGTTCCTCCAGTCAAACCCTTTCTGGAAACGACG | | | | Rat | Human | |
| 2396 | cg02515765 | CAAGGAGAATATGACAGCCACCTCCCTTGGCCCTTCCAGGGTACAATACG | | | | Rat | Human | |
| 2397 | cg02596500 | TTCTGAATGCTATTTAAACATTGGCAGGGGGCCTCATTAAAGATGAATCG | | | | Rat | Human | |
| 2398 | cg02611007 | CGGTAATTACAAGACAGAAAATTAACTAGAACTCTTATTAAGGCTTTGTT | | | | Rat | Human | |
| 2399 | cg02658132 | AAATGGAACTTGTGTCAGCAAAGAACTGATTTTCATACAGACTTCTTTCG | | | | Rat | Human | |
| 2400 | cg02673411 | CGGCTCGATGCTGGACATACTTGACCGGGGTCATCCTAGGGAAAACACTA | | | | Rat | Human | |
| 2401 | cg02711775 | CTGGAGGTGATGGATGTTTTCCTCCGGTTCTCAGGGCTCCACCTCTTTCG | | | | Rat | Human | |
| 2402 | cg02722823 | CGCTGCAGTCGTAAGGTTTCTCTGCAGTGTGAATTCTCTGGTGCACAATA | | | | Rat | Human | |
| 2403 | cg02724885 | GTCCTCCTGGAGGGGATCTCTGGCCAAGGAGTGTACGGTGAGTGGAATCG | | | | Rat | Human | |
| 2404 | cg02739710 | CGGGAGCCCTGACTAGAAAGAGGGTTCTGGAAATGTGGTGTGTTTCTCAT | | | | Rat | Human | |
| 2405 | cg02779868 | CGCACCATGGCAACATCAACCCGTCAAAGCAAATGAAGGGTAGTAAAAGT | | | | Rat | Human | |
| 2406 | cg02810085 | TTTTTATCCAAATGGCTCAATTACCGCAAAGCCCCACAGAGAAAATTACG | | | | Rat | Human | |
| 2407 | cg02841886 | CGGTAGTCGTGGCGACCAAGCAACCCGGCAACGCGAGTCAACAACAACAA | | | | Rat | Human | |
| 2408 | cg02882406 | TTCACGATCAGTATATTCTGAGGGTTTCTCCGGATTTGGAATGGCATGCG | | | | Rat | Human | |
| 2409 | cg02897704 | CCTCTTGAACATTTACCGTAACCCTCAAAACTCTTCCCAGTCTGCTGACG | | | | Rat | Human | |
| 2410 | cg02944016 | CGGTCGACCGCTGTACTAAAAGGGTTCTCTTGAGAATCCACCAGAAGTCT | | | | Rat | Human | |
| 2411 | cg03036064 | GGAAGGGCTCGCCGCCGTTGGGCTGCTGGTGGTTCTGCAGGGTCTGCTCG | | | | Rat | Human | |
| 2412 | cg03057744 | CGCAGTAAAAACTAACCCTTGGGTTGAATCTTTACTTACAGAGGTATTTT | | | | Rat | Human | |
| 2413 | cg03076661 | CGCATCACCACCTATTTTGACATGCACGGGGCCGTTTGTTGTCTGTCGAA | | | | Rat | Human | |
| 2414 | cg03220194 | TATTTTCCAAAAGCTCGGTCTGAGGCCCCTCAGTCTTGCTTCCTAACCCG | | | | Rat | Human | |
| 2415 | cg03255984 | CGCTGCACCATGAAGGGGAACCTCAAGTCGCACATCCGTATCAAGCACAG | | | | Rat | Human | |
| 2416 | cg03257592 | CGCTGGTAAATCTTTATTAATTTTAATTGGCGGCACCCATTTATAAGAAC | | | | Rat | Human | |
| 2417 | cg03265102 | TGTTCTGTCTTACTCTGCGCCTAGCATTGGAAATGAAAGTGACATTTACG | | | | Rat | Human | |
| 2418 | cg03267882 | TGACACTGTCAACACTGCCCTGGTGGAAGACTCCGAGGGGCTGGACTGCG | | | | Rat | Human | |
| 2419 | cg03342744 | CGGAGTGTTTATGTCAACTACATATTCCCCTAGATACGAATTTGTGACCA | | | | Rat | Human | |
| 2420 | cg03375386 | CGGGCTCTGTATTTCTGGAACAATGAGTATATCCTAAGCCTCATTGAGGA | | | | Rat | Human | |
| 2421 | cg03382217 | TAAAAATTCCCTTCATGAGCATCGACGGGTACAAATTATTTTGTCAATCG | | | | Rat | Human | |
| 2422 | cg03383661 | CGGCAGCTGCACATGTGGGTTTGTTTATAAGAACAAGGTTAGAAACTCGC | | | | Rat | Human | |
| 2423 | cg03532626 | TTTGTATTCTGCATGGTACGTACAATAGCAGACACCATCTGAGGAGAACG | | | | Rat | Human | |
| 2424 | cg03542972 | CCTTCATGTTCATGGTGCTGGAGGTGGTGGTGAGCCGGGTGACCTCGTCG | | | | Rat | Human | |
| 2425 | cg03659513 | CGTTGGCACTTCCACTGTGTACTTTTACTATAAATTGTTGTAGCATTTAT | | | | Rat | Human | |
| 2426 | cg03697136 | CGGAGCTGACGCTTTATCAGGCAGTCGGAAAAACTTTGACCAATCATTTT | | | | Rat | Human | |
| 2427 | cg03734211 | CGGGATATTGCACCACGCTCGCCTCTTGCTGAGCCCCATAAAGGGACTGT | | | | Rat | Human | |
| 2428 | cg03793834 | CGTTTCTAATAATAGAGCAGATGAAGTAATATTGCAATTGATGTTCCCGG | | | | Rat | Human | |
| 2429 | cg03888920 | GCCATTGCTGCTGCAAGCCTTATAACTGCCTTCAGTGCCTGGACAAGACG | | | | Rat | Human | |
| 2430 | cg03932150 | CGTGGCTAAATTGTTAATCAGGGTAATTTAATATAGTTTTCAATATGCCT | | | | Rat | Human | |
| 2431 | cg04138506 | CGGGATTCCAGCATCACCACCAGGAGCTGTACCCACCACCGCCTCCGCGC | | | | Rat | Human | |
| 2432 | cg04182635 | CGGCATGCAAAGGGTGAGTTTTATTTCCATAGATTTTTAAAATTGCTGTT | | | | Rat | Human | |
| 2433 | cg04287515 | GATTGTGTCTGCCTCTACACATATCTGTAATTGATTGCCTAAACCCTACG | | | | Rat | Human | |
| 2434 | cg04326641 | TGGACCGCGGATGGTACGTTCCGCACGTGAGCTGGGTGCTGGTCTGGCCG | | | | Rat | Human | |
| 2435 | cg04441307 | CCTGATTGGCTTCCATCCATCGTGTAGCGTCCTGCAAGTGACTAAACTCG | | | | Rat | Human | |
| 2436 | cg04580151 | CGGACCAAGGGGAAATGAAGAAGCCCCAATAAATCACCATGAAGCCACCA | | | | Rat | Human | |
| 2437 | cg04609744 | GTTAATATATTAGCACACAGCATTGATCAAATGGCTAATCCAATCACACG | | | | Rat | Human | |
| 2438 | cg04638909 | CCAGAAATTAATGGCTATGAGTTCTTTTTTGATCAACTCAAACTATGTCG | | | | Rat | Human | |
| 2439 | cg04664817 | CGCCCAAAGGGGATACTGCATCCTTAGGAAGAAATATGTCCTCATTTTTC | | | | Rat | Human | |
| 2440 | cg04701542 | CGCCTGGGAAAGCCATCTTGAACTGAAAACGGCAAAGATAGAGAGAGGCC | | | | Rat | Human | |
| 2441 | cg04830825 | GGCAATTTCTGGAACTCTTCCCACGGGAAGTTTTCCGGGGCTGCCTTCCG | | | | Rat | Human | |
| 2442 | cg04842607 | GCTGGGAATTCAGGTTAGTGGAGGCCGAGGATCAAAGCGCTCACCTCACG | | | | Rat | Human | |
| 2443 | cg04921727 | TACCGTCCGGCGTTGCCTGCTGGTGGGGTTTTTTACATTTGACGTAATCG | | | | Rat | Human | |
| 2444 | cg04949439 | CCCTCAATAAATGCTTTTTGTAATCAACTTAAAGTATAATACCTACCACG | | | | Rat | Human | |
| 2445 | cg05015154 | ATTAGTCGTCTCACCCAATAATTAGTTTTTTGTTTCCCTGTCTGTTTTCG | | | | Rat | Human | |
| 2446 | cg05019982 | CGCCTTGTAAAAGCAGATTACAGATGAAATGGGGCACATATAAATGCTAA | | | | Rat | Human | |
| 2447 | cg05047982 | CGGCCCAGGTTCGCCAGCAGCCCAAGAGCCTCAAAGTACGTGCAGGCCAG | | | | Rat | Human | |
| 2448 | cg05082095 | ATCTCCAGAACAAAGACAACATTGACAAACCCAACAAAAACAAACAGCCG | | | | Rat | Human | |
| 2449 | cg05098471 | CACAATGCATTGGGCTGCAGCAAGTAGGCTCCTCGGCAGGGGTGGGTGCG | | | | Rat | Human | |
| 2450 | cg05098623 | TCAGTTCTGTCGAATAGGGCATCATCACCTCCCTCCAGTCTGCGTCATCG | | | | Rat | Human | |
| 2451 | cg05147550 | AATTACCCATCAAGCCATATCTTTTCAGCCCAGAAATGCGCAATAACACG | | | | Rat | Human | |
| 2452 | cg05202136 | CGTCATTTTGATGTCACGTTTCCATAGCAACAGAGCAACTGCATAAGCTA | | | | Rat | Human | |
| 2453 | cg05232001 | TCTCAGTCCTTAATTCCAGTCAATTCCAGTCGAAAGGCTGATAGGCATCG | | | | Rat | Human | |
| 2454 | cg05234151 | CGTGTGGCTATAAACCCTTCCGTTGTGAGGTTTGTAACTACTCTACCACT | | | | Rat | Human | |
| 2455 | cg05273821 | GGTGGGTACAGCTCCTGGTGGTGATGCTGGAATCCCGATTCCCTGGTCCG | | | | Rat | Human | |
| 2456 | cg05337739 | TGGTCCTCAGTGACTTCATGAGCCCCCTGTTTACCTTACATGGTCACACG | | | | Rat | Human | |
| 2457 | cg05354872 | GGGGAATATTAATGATTCAATTTTCAACCGGGTTCCACTCCAGGGCCTCG | | | | Rat | Human | |
| 2458 | cg05396010 | CGGCATTTCTTAGGCGAGCCAGGGTCTGCTCACAGCCATGCCAGAGGGGT | | | | Rat | Human | |
| 2459 | cg05396320 | CTATGATGATTAGTGTAACAAAATAGATCCAGGGCCAGTCCCTTCCTACG | | | | Rat | Human | |
| 2460 | cg05397631 | CGCAGATCAGAATACAAAAGGAGAAGCAAGAAAATGACACCCAGCCAGGA | | | | Rat | Human | |
| 2461 | cg05543909 | AAGAATGTAAAATCACCGGCATAGATAGGTATATGGGAAAACAACCCACG | | | | Rat | Human | |
| 2462 | cg05578172 | GGGTAAACCGACCTGGTCCGGCATGCATTCATCATGTAATTTTCCAGACG | | | | Rat | Human | |
| 2463 | cg05679822 | GTTGCTGGGTGACTCAGTGAGCTTTGCATCCGGTCTCATTCATAAATCCG | | | | Rat | Human | |
| 2464 | cg05686715 | CGTCTTTCTTACTAATAGGATTCTGTCTGCTTCAGCAGGCAGTAATTGAA | | | | Rat | Human | |
| 2465 | cg05698015 | CGGCAGCAGCGAGAGCGGAAGACATTAGAGACCCGAAAAATAAGGGAAAA | | | | Rat | Human | |
| 2466 | cg05789487 | CGTGACCCTGACAGGTCCTGCCTATGGCGCGGCAGACCACCCACGCCGAG | | | | Rat | Human | |
| 2467 | cg05791038 | CGCTTTCCCACACGCCGCTGCGCCCCTTCAGCCCGCCCAGCCACTCGCCG | | | | Rat | Human | |
| 2468 | cg05791494 | CGAACAGACCGCTTTTATTGGCTTTTAGTGCTATTACTGCTGTCATAAGT | | | | Rat | Human | |
| 2469 | cg05798330 | TTTCCATGATGAATTGCCCGAAGCCCCTGAATCACAAACCATTTTTTCCG | | | | Rat | Human | |
| 2470 | cg05820448 | CTTGCTACCATTTAAAATCAGACTCTTTTTGTCTTTTGATTGCTGTCTCG | | | | Rat | Human | |
| 2471 | cg05852043 | CGGGTTTTGTGTTTTTCTAAAATAAAGAGAAGGATTATCAGAGAGGAGAG | | | | Rat | Human | |
| 2472 | cg05895882 | ATCTTGACCTGCTGGTCACTAAGATTCAAGCGGTCTGAGAGTTCCCTCCG | | | | Rat | Human | |
| 2473 | cg05958112 | TGAGCTTTTCCCCTGGAGGATCCTCATGCCCCATCTCCACCTAGGGATCG | | | | Rat | Human | |
| 2474 | cg05983884 | CGGCTCACTTCATGGACATTAATTTTAATGGGACGATTATTACCCTGTTT | | | | Rat | Human | |
| 2475 | cg06014896 | CGCTCAAGTGCACTTTCCGGTCCCTCCAGGTCAGCAGGCTGCCCAGCAGC | | | | Rat | Human | |
| 2476 | cg06024489 | CGCTATCCCGGCTTTAGGGGGCATCTCATTACCTCCAGGGGTCATCGTCA | | | | Rat | Human | |
| 2477 | cg06070696 | CGGAAGTGTGTGTTGACACAAATGATTAAGGCCAGGATTCCTACAATTGA | | | | Rat | Human | |
| 2478 | cg06097717 | AAGCTCTGTCCCATTTGGCTAATTCAGAAGTTAATGGAAGGTCTCTTTCG | | | | Rat | Human | |
| 2479 | cg06295366 | GGTGGGCTTTGTCACCAGCACGCTGGGTCTGGCATGCCCAGCTATGCTCG | | | | Rat | Human | |
| 2480 | cg06425973 | CGGAAATTTGAATACCACAGTAGCATGGAGTGTGACCTCATGGAGACTGA | | | | Rat | Human | |
| 2481 | cg06681652 | GTGCTGTCCCTCTCCACTTTCCACATCCACAAGCGTAGGATGAAGAAGCG | | | | Rat | Human | |
| 2482 | cg06683527 | TTCTTTTCATTATTTCCCTCCAAAGGTCAGTTATCCTCTCAGGCGGGGCG | | | | Rat | Human | |
| 2483 | cg06685968 | CGGTTCTCATCCACATGACCGACAGCGGCCAATGGAAGGGCCGAACAACT | | | | Rat | Human | |
| 2484 | cg06695854 | GGTTCTTAAACCAGTTGCTGACCTGGGTGGTGGTGAGGCCGGTGGCCTCG | | | | Rat | Human | |
| 2485 | cg06710083 | CGACAGGTCAGACTTGAACAGGCAAGGTCCACCACCAACCATCGTCGAGT | | | | Rat | Human | |
| 2486 | cg06829904 | GTCATTTTATGGTCAATTTTCAGAGTGTAACTGCACTTTAAGCACTAACG | | | | Rat | Human | |
| 2487 | cg06834901 | CGCAAGTAGGAAGCTTTTTGCACTCCACCACCTCTGGCCGCTGGGAAGAC | | | | Rat | Human | |
| 2488 | cg06878994 | CGCCAGGGCTGCCAGCAATTTGCTTATCAGAGTCACTTTGAAACAGCTTT | | | | Rat | Human | |
| 2489 | cg06925219 | CTTCTGCACTCCGTGTCCTAAATATGGATAATTAGCATCAGTTTATCACG | | | | Rat | Human | |
| 2490 | cg06973724 | ATCTGTGATTGGTTATCTCTCTATCATGCATTGCTTCACAAGGGGAAACG | | | | Rat | Human | |
| 2491 | cg06998842 | ATAAGCCGTCTGCAGTATAGTTAACTTTCAATTTCAGCCAATTTTCGACG | | | | Rat | Human | |
| 2492 | cg07043724 | ATAACTTGTATTAAAATACCAATTACATTTATAGGACCTTTTAAAACTCG | | | | Rat | Human | |
| 2493 | cg07094276 | TATGTTAGAAACATACAGTGTGGCATTTAGTATATACACTCCCTTGCTCG | | | | Rat | Human | |
| 2494 | cg07228206 | CACCACCTTCTCCTTGGTAACAGATAAGAGTCTTTCCACTTCAATCTTCG | | | | Rat | Human | |
| 2495 | cg07305197 | GACAGAGCAATAAATCAACTAATAACTGGAACCTCATTTTCTGCTCCACG | | | | Rat | Human | |
| 2496 | cg07335109 | CGGCTGTATTTCGGGATCTATTATAGTCTGTCCAGACAGATCCCATTGTA | | | | Rat | Human | |
| 2497 | cg07341770 | CGCCTCCAGAATAACGAGCCGAAAACATGTGTACTGTAAATAAAGCCTGT | | | | Rat | Human | |
| 2498 | cg07350767 | ACTGATGTGCAGCAGAAAATGGCTCCTTTCCCCTTTCCCTCCACCGAACG | | | | Rat | Human | |
| 2499 | cg07392671 | CGCCGCCGCCGCCAAGGGGAGTTTCCAGGAAGTGGCCATATTGGATCCAT | | | | Rat | Human | |
| 2500 | cg07525158 | GTCGGTCATGGCGCCCTGGTCCCTCACGTACTGGTTAAAATTAGGAGACG | | | | Rat | Human | |
| 2501 | cg07540568 | AGTTGGTGTGGTACAGCTTGGCAGCCTCCTGAGCCGGGAGCATCGCGGCG | | | | Rat | Human | |
| 2502 | cg07558872 | CGGCGGAATTTTTAAAGAGGGATGTGGTTACCTTGAGCAGAAATACCCAA | | | | Rat | Human | |
| 2503 | cg07607355 | CGGAGCTATTTAACCTGAGCATCCCCAGGTGTACGGAGGCGCCTGGCTGT | | | | Rat | Human | |
| 2504 | cg07639660 | ATGACCTTTGATGTGTTTAAATAACATGGCAAGTCTGAGCACACACCTCG | | | | Rat | Human | |
| 2505 | cg07680301 | TTTTTTTTTTTCAAAGAAAGTCACTTTTAATTCCCAGGGCTCCCCGCTCG | | | | Rat | Human | |
| 2506 | cg07720974 | TGTGTAGCGTGGCCAGTAGCAGCGACATCAGCTTGGGTTCGACCAAAACG | | | | Rat | Human | |
| 2507 | cg07795407 | CGGGCTTTGATTGACAGCTGGAGTGGCAAAAAGCCATGAAACACGACAGT | | | | Rat | Human | |
| 2508 | cg07806359 | TAGGTGCTGGTCCTTGGCTGTTTGCAACCACTTTTCTGATGCGGTTGACG | | | | Rat | Human | |
| 2509 | cg07859114 | CCGCTGTGGTGAGAACAGAGTTGACACTTCTTTCCTTTCCACTTACTGCG | | | | Rat | Human | |
| 2510 | cg08003189 | CGGGCTAATTAGCCAATCAAATTAAATGCAGCACCTGCTCCCAGCCTGAT | | | | Rat | Human | |
| 2511 | cg08013737 | CGGTAACTTATAACTTATATATTAGGGCCCATGTGACCTAATAAAGAACA | | | | Rat | Human | |
| 2512 | cg08124155 | CGGGGTTTAGGGTTTTTGTAATCCCCCTAAACTGTCTTTGTTCGAAATCT | | | | Rat | Human | |
| 2513 | cg08129342 | CATTGACCCTGAAACCTATGAGGACCCAAATAGAGCTGTCCATCAATTCG | | | | Rat | Human | |
| 2514 | cg08153819 | CCAGTTTGCTGGACCAGTTCCCTCGGGCCTTATTCTCATCCCCTTGCTCG | | | | Rat | Human | |
| 2515 | cg08154911 | CGGCCAGGATGGTATTCAATTTGTCCTGATCACTGGGCTGCAGTGAGTTC | | | | Rat | Human | |
| 2516 | cg08215925 | CGCGGAGGGAGATGTTGTTATTTTTTGCTGTTGTGCGTCCCTGACGTCAC | | | | Rat | Human | |
| 2517 | cg08232037 | CAGTAATCCAATAAGAGCATTGATTAGGCTACAATGATTCAATTCAAGCG | | | | Rat | Human | |
| 2518 | cg08317235 | CGTCGGCCTACCCCAGCCACCCCATGCCCTACAGCTCCGTGTTGACTCAG | | | | Rat | Human | |
| 2519 | cg08352408 | TACTCCACATCAGTAAATGTTTACGTAACCTGTCCTTTCCCAAGAATCCG | | | | Rat | Human | |
| 2520 | cg08368788 | GCGGCCCTAGAGTTAATCCCATCAGCCGAGGTGAGGCACCTGTTACCCCG | | | | Rat | Human | |
| 2521 | cg08460572 | CGTGTTTAAAAACAGTGTTCTGACACTTTATTGCACAATGAGCTCTTACA | | | | Rat | Human | |
| 2522 | cg08492897 | AAAAAATCGCAAAAAATCCCTAAAAATCCGGGATGCTCCCCCTTTTCTCG | | | | Rat | Human | |
| 2523 | cg08515724 | TGTGGTCACCTGGCATTTGGGGCGGCGTGAGGCCCTGCTGGAAGGGGTCG | | | | Rat | Human | |
| 2524 | cg08759703 | CGTCTGTTCTGTGGACAACTGTTACTGTTCTTCCGTGGCCAACCATGGCG | | | | Rat | Human | |
| 2525 | cg08827873 | AAAAAGCATTAGTAACACTCCTGGTTTTAAATGAACCCTATTAATATTCG | | | | Rat | Human | |
| 2526 | cg08987848 | CGAAGAATATAGTGGGCTTTATTAGCACCAGTTTCGCTCCCTGACTGACG | | | | Rat | Human | |
| 2527 | cg09035699 | CGCTCAAACATGTGTGCTAAAGGCAAATAGGAAATGTGCACATCCGCACA | | | | Rat | Human | |
| 2528 | cg09075088 | TGGGCAGGTGCCATCCCGCGCCCTAAAAATAACGGCAGGGAACTAGGTCG | | | | Rat | Human | |
| 2529 | cg09130815 | CGCAAAGTGCCCAGTCCGGAGGCGTTTCTGGGCAAACCCTGGTCCTCCTG | | | | Rat | Human | |
| 2530 | cg09155589 | CGCCCCGTTCTTGACCAAACATGACAGACTCTGAACATGCAGGGCACGAC | | | | Rat | Human | |
| 2531 | cg09175523 | CGGCCTCGGCTCCTAATTGGAAGCATTGGGCATTATCAACGGAGGATTTG | | | | Rat | Human | |
| 2532 | cg09204130 | CGCTGGTCTCCGTGTTGGTGGGTTTATAATCTACATAAAATTCCTGGGTG | | | | Rat | Human | |
| 2533 | cg09260635 | CGCTGACACTCCAGTATTTAATTATGCAGCTGTCAGAGCGGCCCTTTCGA | | | | Rat | Human | |
| 2534 | cg09355828 | CGCACGCTGTCTCGCCATGGCTTTGATGTCTGTGCCAAGCTGGCTTGGGA | | | | Rat | Human | |
| 2535 | cg09530369 | GATGGAAAACTTTTAAGCCCTGGCTATTAGCACGCGGCCAACAAAAGCCG | | | | Rat | Human | |
| 2536 | cg09531328 | CGCCACTTTATTGAAAATAGCCTGTAAGTTGTTATTAAATGTATTGACTG | | | | Rat | Human | |
| 2537 | cg09598225 | ACCTGCTTGTCCTTCTGCAGCTGCTTCTCGATCTTTTTGTTGGCCTCACG | | | | Rat | Human | |
| 2538 | cg09610735 | GGGTCACGTGCTCCCCTCATTCCTTAAGGGCGGCCTGGGAATTAGTGTCG | | | | Rat | Human | |
| 2539 | cg09643584 | TCATAAGTGTCAGGACATACCAAGGTTAGCGGTCACTGGAAGTGTGCTCG | | | | Rat | Human | |
| 2540 | cg09667338 | GATTTATAAATATTGTGCACTATCTGCTGTGGCATGGCTCTCATGGGACG | | | | Rat | Human | |
| 2541 | cg09786757 | TCCCATCTGTGGTCTCCAAGTGTCTGCCTCTTGATTTAACTTTGTCCCCG | | | | Rat | Human | |
| 2542 | cg09789157 | GCCTACCACAAGTCGGTGTGGCGGGGGGTGGAGGCCAAGCTGCACCTGCG | | | | Rat | Human | |
| 2543 | cg09798507 | TTCAGTAGAAAATGACGGGTGATTTTTGCCCTTGTCTCCCGAGATCTCCG | | | | Rat | Human | |
| 2544 | cg09802094 | CCGAAGCGACCCTGACATTTAGAAAGACTCCAATTGCCTCGTTAAAATCG | | | | Rat | Human | |
| 2545 | cg09919752 | CGCCCCGAGGTCTTTCTGAGCAGACTGCTAAGCACTGGCTGTCTCCCCCG | | | | Rat | Human | |
| 2546 | cg09955247 | TTAATAATCTGTCATCAGGACCAGAGGCAGTCATAAATTATATGGGAGCG | | | | Rat | Human | |
| 2547 | cg10116181 | GAGTGATCCGGCAATGCGCTCCTGACCTTGCAGGACAGCTAATCCATCCG | | | | Rat | Human | |
| 2548 | cg10155596 | CGACGGCCTAAAGTTCTTCAAAGAGAGGTAGATGTGTATGATATTTTCAT | | | | Rat | Human | |
| 2549 | cg10210458 | TGGTGAAGGCATTTAACAAAGACTTCATTTTCCCTCTGACTTTGGCAGCG | | | | Rat | Human | |
| 2550 | cg10251050 | CCTGCTTAGGATGAGAACAAGTTGAGCAGTGCCAACGGCCATGAAGAACG | | | | Rat | Human | |
| 2551 | cg10319365 | CGCCTGTAGGAAATATTAATAGACTATTATGAGGTCCTACAACTAATTTT | | | | Rat | Human | |
| 2552 | cg10334858 | TTGACTTGACGTTTGGATCTAAGAGGCCTTCCTTCGCCATCCATTCATCG | | | | Rat | Human | |
| 2553 | cg10423457 | CGCCGTGATCAGTTGGACTAAGGATGGGGTGCACTTGGGGCCCAACAATA | | | | Rat | Human | |
| 2554 | cg10481534 | CGAGGGCTGGGGCCCCCTCAGTTTGTGTAAACCTGAGTTCCGATCACACG | | | | Rat | Human | |
| 2555 | cg10587989 | CGCCTCCTGAACTAAAGATAGAAACAGCTGGCCCTTCCAGGCAGCTAAAA | | | | Rat | Human | |
| 2556 | cg10588150 | CGCGCCTCTCCCCGGCCGGGGGGACACTTGGTTCATTCCAGCCGCAGAAG | | | | Rat | Human | |
| 2557 | cg10668528 | CGGATCCTGGGGTGGGGGAACTCCTCACTATAATCCAGCAACTTGCCAAC | | | | Rat | Human | |
| 2558 | cg10822690 | CGATTGCTGTTTGAATAACAGATTAATTTAATAATCAGTGGGGTATTGGA | | | | Rat | Human | |
| 2559 | cg10829846 | ACATTTAGTCCGGGGGTGACTCTTCTCCTTGGCACTTGTAGAATAAATCG | | | | Rat | Human | |
| 2560 | cg10901302 | CCTCTTTTGTTTATCTGACAGCTAAATATCAAGGCAATCACCGCCTCGCG | | | | Rat | Human | |
| 2561 | cg10901883 | TTGTGCGTTTCCCAAAGTCTACAGGCTTTTGATGAAAAATTCATGGCACG | | | | Rat | Human | |
| 2562 | cg10918079 | TCCATGTCGGCTCGGAACAGATTCGCCTCCATGTGTCTCTGCGTGGTACG | | | | Rat | Human | |
| 2563 | cg10939684 | CGGAAAATGAAAATATTTATTTTAAAAATTGAAATGTTTGGAACCTTTAG | | | | Rat | Human | |
| 2564 | cg10939790 | CGGGTTCTTGTCCGGGTGGTACTTGAGCGCCAGCTTCCGATAGGCCTTCT | | | | Rat | Human | |
| 2565 | cg10988592 | TGGAAGGATGCTGAAATGACAGGCCTAGTAGACGCTTGTCTTAATCATCG | | | | Rat | Human | |
| 2566 | cg11079986 | CGGGCACTACTCCATGCACTGTTTACACTCGGCGGGCCATTCGCAGCCCG | | | | Rat | Human | |
| 2567 | cg11094341 | ACCTCTTGTTCACCAGATCACTTTGTGTGCACTTGTATATTTCATTGTCG | | | | Rat | Human | |
| 2568 | cg11102919 | CGCCTAATTAAATTAATTAGGGATTCTTGTCAATCCTGGATTAATGGCCA | | | | Rat | Human | |
| 2569 | cg11103841 | TAACACACCTCGTGCACGACAAAAATTTGCTCCTGGCAATCATGGTTTCG | | | | Rat | Human | |
| 2570 | cg11202178 | AGCCCTCCCACCCCCTGAGATCAAGGCAATGGTGGTTTTACAGGCTGACG | | | | Rat | Human | |
| 2571 | cg11250627 | CGGTGTCTAAATGCATTCATATTTTTATGATTGTTTTGTAAATATCTTTG | | | | Rat | Human | |
| 2572 | cg11356333 | CGCTGACCCTGCTGTTTAGCCCATTAATGATGATGCACAAGCTTCACTTT | | | | Rat | Human | |
| 2573 | cg11382709 | GACGCAGCCAGCCATTCAGGAAGGCAGCGCTGGAGAGCGGGAGGCAGCCG | | | | Rat | Human | |
| 2574 | cg11392697 | TGGGCACTTGCACAGAGATGATCTCTGCCATCATTTCCGGAAAGTCCACG | | | | Rat | Human | |
| 2575 | cg11534937 | CTCCCCTCGGCGGGGCTGAATGATCAAAACTGGTGGTGAGAATTTTTCCG | | | | Rat | Human | |
| 2576 | cg11545945 | GTGATGACAAATGCCCGTTATCAGCGAACGAGGCCGATGACAAATGGGCG | | | | Rat | Human | |
| 2577 | cg11548411 | TATCCTCTAATATAAATGTCAGTGATGCTATTTTCCGCGCAGTCATTTCG | | | | Rat | Human | |
| 2578 | cg11577341 | CGCCCGATTATGCAGCCAATTAAGTTATTTGGAATGGTGAGTTCATGGGT | | | | Rat | Human | |
| 2579 | cg11617475 | GGACGTGTCTCTGCTGCACCCTCTTGAAGCGGCAGGACTGGGCATAGCCG | | | | Rat | Human | |
| 2580 | cg11670972 | GAACTGTTATTGTTTGTGATCCGCTCCATTTTATGGAAACAAGCTCTGCG | | | | Rat | Human | |
| 2581 | cg11758048 | ATGGCCTCCAACTTTAACGACATAGTCAAGCAGGGCTACGTGAAAATCCG | | | | Rat | Human | |
| 2582 | cg11789731 | CGGTAGAAGATCCAGCATCCAAAAGTGACCCAGTGACTGGCCCAGCTGAG | | | | Rat | Human | |
| 2583 | cg11900861 | TCATCAGAGTTCCCCCTTTTGTTCCAAGTCCCGGAGCAGACAAAGAGGCG | | | | Rat | Human | |
| 2584 | cg11994228 | CGCCTCCTCTGGGCCTGGGAGAGAACTGCCCCTACAGGGTGGCTTGCAAG | | | | Rat | Human | |
| 2585 | cg12012631 | CGGGCAGCAGAAGATTTCGTGACACTTAGCACGAAAGGGGGACTCTTTTT | | | | Rat | Human | |
| 2586 | cg12035862 | TTCCCTTGAGGCAGGTGATGTAGCGGTGACAGAAGTTGTCGCACAGGTCG | | | | Rat | Human | |
| 2587 | cg12063651 | CGCGCTCTTAATAGACCTGTTTCAACAATGTATCTTGAAAAGGAATACAT | | | | Rat | Human | |
| 2588 | cg12163477 | CGGGAAGGCCTGAGGGAAGCCCACCCGCCCCAGAGACTGCCCACCCTGGG | | | | Rat | Human | |
| 2589 | cg12172899 | CGGAACAGGATGACTTTGCCAATATCCCTGACCTGCAAAACCCAGGAACC | | | | Rat | Human | |
| 2590 | cg12191257 | CGGTGATGCAGAAGGTATGTGCTTTTTCAGTTCTGGTGCTGATGCTGTGT | | | | Rat | Human | |
| 2591 | cg12219231 | CGTTGGTCTGGCGGCCACTTTCTTTGAACATTAGCTCGCTTTCAGCTCCA | | | | Rat | Human | |
| 2592 | cg12234807 | CGCGGAAATATGAGCGAGTAATTTTATAAGTAACAAAGGATCAGGGATGG | | | | Rat | Human | |
| 2593 | cg12249796 | CATTACAGATTAAAATGAGCCACATTTGCAGTTGATGGTATCTGTTTTCG | | | | Rat | Human | |
| 2594 | cg12387371 | CGGCCTGCAAGAGAGGCCTGGAAGAGAAGCAACTTTAGTTGTGCAAGCAC | | | | Rat | Human | |
| 2595 | cg12396207 | CGGTAAGGCAGGCTGCATGGAAGCCTGAGACATATGAGACATCATCATTC | | | | Rat | Human | |
| 2596 | cg12556490 | CGCAGTGACTTGGGGCCAAATTGGAGTTTATATGTCAAAACAGGCTCAGA | | | | Rat | Human | |
| 2597 | cg12600656 | CGCTTCCTATGGATAACGTGCCGGGGCTGACCTTGCCATCTGGGGACGGA | | | | Rat | Human | |
| 2598 | cg12694663 | CGCGCTGAGCTAGGAATAAAGTTCACGTAATCACATGAGAGTGGAGAAAA | | | | Rat | Human | |
| 2599 | cg12737311 | CGAAAACTTGGATATACTGCAGCTTCTTTTGGACTACGGTTGTCAGGTAC | | | | Rat | Human | |
| 2600 | cg12808364 | CGGAGCAGCGTGGTGATAACCAGAGGCGTGAAATTACAAAAGTAAAATTT | | | | Rat | Human | |
| 2601 | cg12813088 | CGCTGTTGCCCTGGGATTCCGATGAATCTCCTGAGGCCTCCCCTGGTCCT | | | | Rat | Human | |
| 2602 | cg12854350 | ATGTGGATCCGAGGCGGAACAGAGCAGTTGTTGTCCCAGAGGATATATCG | | | | Rat | Human | |
| 2603 | cg12854758 | AGCAAAGTGCTGAATGGAATTTGTGCCTACCTCAATAGACATTGGGTTCG | | | | Rat | Human | |
| 2604 | cg12887931 | AAAAGCAGCAGCAGAGAGTTGGAGTCACCTTGACCGCCATGCTGTGCTCG | | | | Rat | Human | |
| 2605 | cg12936001 | TCACCATCCTGGACACACTCGTTTGTCAATGTCCCTCTGAAAATGTGACG | | | | Rat | Human | |
| 2606 | cg12999766 | CCGCAGGAACTTAACTTACACATGCCGTGCCAACAGGAACTGTCCCATCG | | | | Rat | Human | |
| 2607 | cg13023398 | CGTCCGAAACCTCCAACTCCAAGGGTATCAATGATGTTGAAATCAGACAG | | | | Rat | Human | |
| 2608 | cg13078590 | CGAACCATCAGGAAGGCGTCTTCCTTAACATTAATTACAGAAAATGACAA | | | | Rat | Human | |
| 2609 | cg13106512 | CATCCTGGATTTCATAAACCAAAACAAGAGAGCCTGGCAGGAGGACAGCG | | | | Rat | Human | |
| 2610 | cg13123762 | CCCCACCAAAATTTGTTTCAGATCTAATAAAACTGTGCTTAACACACTCG | | | | Rat | Human | |
| 2611 | cg13138986 | ACAAAAACTAAATTAGGCTTCTCCTGTTATCCTACAAATATTTAATGACG | | | | Rat | Human | |
| 2612 | cg13144187 | TGACATCTCAAAGAAGCACTTTGATGCAAGCTTCTTTTGGGCCTGTGACG | | | | Rat | Human | |
| 2613 | cg13158272 | CGTGAATCTATTAATTTAACAGGAACTAGGCTCAGCACATATATTCCTTG | | | | Rat | Human | |
| 2614 | cg13246416 | TTCTTCTGCGATGCTGTAGCCTCCTGGGTGAGCCCGAAGGATGACCTTCG | | | | Rat | Human | |
| 2615 | cg13366833 | CGCTGCCCCAGACTCACAGAGTCTTGGGCATCTCGTCCTCCATGGCTGCT | | | | Rat | Human | |
| 2616 | cg13466649 | AGGCTGCTGAAACCATCAATCTTGCTGGCTCTTGTAGAGGTCAAGAGACG | | | | Rat | Human | |
| 2617 | cg13502730 | TTAGTTCCACGCTATGAGCTAAGTTGATAACATGAAAAGACCCATAAACG | | | | Rat | Human | |
| 2618 | cg13505793 | CGATCAGCCAGCCGTGAACTCTGGGCCGAATTCATTACAGTTTAATAGTG | | | | Rat | Human | |
| 2619 | cg13525872 | CGCTAGGGAAATAAAAGCTTCATCTCAGATTATAGGTGGGTATTTTTGGA | | | | Rat | Human | |
| 2620 | cg13655737 | TGGAAAAGCAGGACACCTTCTTTTTCTTTTTCTTGTTCCTCTGCGCCTCG | | | | Rat | Human | |
| 2621 | cg13768953 | GTCGGCTCGGAACAGATTCGCCTCCATGTGTCTCTGCGTGGTACGTGCCG | | | | Rat | Human | |
| 2622 | cg13777117 | TCTGCGGGAAACATATGTCGGGAGAAGTTCACATTCCGGATTCTGCTCCG | | | | Rat | Human | |
| 2623 | cg13785960 | ACATACCTGGCCATGCCTTTGTGCATATCATTGTGCAGTCGCAACTGACG | | | | Rat | Human | |
| 2624 | cg13895665 | ATACTAATTTCCTCTCCACCTTATCCCCTGAACACTGCAGACCTTTGGCG | | | | Rat | Human | |
| 2625 | cg13899234 | ATGGGAAGTTCTGTGACTGCTGCTACTGTGAGTTCTTCGGCCACAATGCG | | | | Rat | Human | |
| 2626 | cg14002601 | GCCTGGAGTCTTTTAAATATAAGTAACACGCAACCAGTAATAAGCTGTCG | | | | Rat | Human | |
| 2627 | cg14007694 | CGGCTAGTGGACCAGGTGAAGTACATTAGAAACAATTACTTTCCAACTGG | | | | Rat | Human | |
| 2628 | cg14039101 | TCTTCGGTTAACTCCGCTTGTTTCTCTACAAAATGGCGCCGGAGGTCGCG | | | | Rat | Human | |
| 2629 | cg14113335 | CGGTGCGGCACTTTTGTGTTCAGTAGCATGAATCATTAATCATGAGACAG | | | | Rat | Human | |
| 2630 | cg14224932 | CGTGGTAACAGAGTGTTCTTTGTTACCACACACTGCTCTTTGTTATCACA | | | | Rat | Human | |
| 2631 | cg14292527 | CGCCAGGCCTAATCCCTACACAGTGGAACAAAGCCCAGCAAAGCCTTTGA | | | | Rat | Human | |
| 2632 | cg14428543 | CGCACATGCGCACAGAGCACTCAATCTGACACCCCTCGCCGGGGCCAAAA | | | | Rat | Human | |
| 2633 | cg14467140 | CGCTTAGGCCCCTCACCAAACTCTCAGTAACCATGGTAACTGTATACAAA | | | | Rat | Human | |
| 2634 | cg14469373 | CGGGCGGACACCGAAACACGAACAGGAAGAAACCCCCTTCATAAGGAGTG | | | | Rat | Human | |
| 2635 | cg14550429 | CCGAGGTAGGGCACCACTCCCAGGGAGTTGGGGCTGGACACGGAGTAGCG | | | | Rat | Human | |
| 2636 | cg14577476 | GGGTGGCCCCAGGATATCAACAACATTAGCATAGCCCTCCCTCCCCAGCG | | | | Rat | Human | |
| 2637 | cg14628884 | CGCGATGTTGTGATGAAGGTGAAAAGATCGCTCTTAATTAGATTAAAAAC | | | | Rat | Human | |
| 2638 | cg14644523 | CACTCATAAATTTGGCTTGATGACCTCCGGGAGGTTAGTGATGGAAGCCG | | | | Rat | Human | |
| 2639 | cg14665342 | CGTGTGGCCTGCTCTCATGGAGAATGACTGTGTCATTATGAAGGGAGAAG | | | | Rat | Human | |
| 2640 | cg14720152 | CGGATTTAAACCACTAGACAAGCTATTAATTTAGCTAGGCTACCCAGGGT | | | | Rat | Human | |
| 2641 | cg14783231 | ATTGTATTTGCATTTTAATTTTCCACATAAACAAAGGCCCAGAGTACTCG | | | | Rat | Human | |
| 2642 | cg14817764 | TCCGTTCCGTTTTGGTCGAACCCAAGCTGATGTCGCTGCTACTGGCCACG | | | | Rat | Human | |
| 2643 | cg14870509 | CGGCTTGATATTTCCGAAGAATATAGTGGGCTTTATTAGCACCAGTTTCG | | | | Rat | Human | |
| 2644 | cg14980868 | TCCATCTGCTGCTCTGACGCCTAGGAGCAGTTATTCCACAACTGTCTGCG | | | | Rat | Human | |
| 2645 | cg14988533 | TACAGCTTTTTGGGAAGCTGTTTGAAAATTAAGCTTGGATCAGTTACTCG | | | | Rat | Human | |
| 2646 | cg15008665 | CGTGAAATACTGAAATTTGCCCAGTACCTTCTCAGACTATTAACAGGTTC | | | | Rat | Human | |
| 2647 | cg15036140 | CGGCGCTCCCTGCACAGGGTTTCCTGTCACCCTCGCAATGGGCCGGACCA | | | | Rat | Human | |
| 2648 | cg15051960 | TCTTTTGCACAATCACGCCCACATTTGGGGTTGGAAAGCCCTAATTACCG | | | | Rat | Human | |
| 2649 | cg15055738 | AAACTTGCTGTGGGTGACCATGGCGCACGGAGCCAGCGTGGATCTGCGCG | | | | Rat | Human | |
| 2650 | cg15060871 | CGCCTGTTCCCCATGGACCTGAAGTTGAATGCACACCTTGGCTCTGAACT | | | | Rat | Human | |
| 2651 | cg15112657 | GTGAATATCCTTCTCCCTCCTGATGCTAAAGAGATTGCCACTCGCTTCCG | | | | Rat | Human | |
| 2652 | cg15159458 | AGAAGTAGCCTTGAGGGGCCCACCATATTGGACATAGAAAAATTTCATCG | | | | Rat | Human | |
| 2653 | cg15316343 | CGGGAGTACGTGTTAGTGGGAGCAGATGGCTCCAAGCAGAAAATGCCTGC | | | | Rat | Human | |
| 2654 | cg15353421 | CGCAAGGGAAATTATAAAAAAGTTCATGTTCACGGTTCTCATCCACATGA | | | | Rat | Human | |
| 2655 | cg15471499 | GCGCCCGATGTAACTGTAATTACTCCATTGATATTCCTCACACAATAGCG | | | | Rat | Human | |
| 2656 | cg15574290 | CATGTTTCTCTCTATTGTGCCATCATAAAAAAAACTCCGCTGGTGACTCG | | | | Rat | Human | |
| 2657 | cg15591276 | TTTCATTATATCAATCACATTTAATTGGCAATTTGTACGAGCAATGACCG | | | | Rat | Human | |
| 2658 | cg15598853 | CGCCTCTCTCAGGGAGATCTGGAGAAATACGCAGCACAGATGGGCCGAGC | | | | Rat | Human | |
| 2659 | cg15719056 | TTTTACTGCACTGCTCCCTAGTATCTCAGATTCATCTTCCCTGACGCACG | | | | Rat | Human | |
| 2660 | cg15830792 | CACCAGGTTGAGGGGTCCTTCCATTACTTCCATAGACCCCGGGGTAAGCG | | | | Rat | Human | |
| 2661 | cg15861063 | TGTATTTCTGCAAATGTGTGAAATGCAAAATGTGCCCTCCAGCAAAAACG | | | | Rat | Human | |
| 2662 | cg15874422 | TCTCGTAGCCCTTGTAGTTCTTCATGTTCAGTGTCATCTTGCAGGTCTCG | | | | Rat | Human | |
| 2663 | cg15931876 | CGGATGTTGCTCCCCTAGATTGCCCGTGAGGCAGAGGCTGCCATCTACCA | | | | Rat | Human | |
| 2664 | cg15938989 | CCAGACCTTCAGCTGCGAAGAGTGCCTGTTCAAGACCACACACCCTTTCG | | | | Rat | Human | |
| 2665 | cg16101912 | CGGTGGCATGTTTTAGATGACATTTCAATTGTACGAGCAATTTGCATTCT | | | | Rat | Human | |
| 2666 | cg16197002 | AACAAGTACCTGGTGGAGGATGTGCTGCTGCTCAACTTCGAGGAGATGCG | | | | Rat | Human | |
| 2667 | cg16273620 | CGGCGGCAAATGACACTCTCGGAATCTTGACTCCAATCTGATGCCTGGTC | | | | Rat | Human | |
| 2668 | cg16321970 | TTCACCAAAGAAACTTGCGTCCATTGGAGGTAAAATCTTGGCTAGGCTCG | | | | Rat | Human | |
| 2669 | cg16367989 | CGAAGTTCTTGGTGAAGACCAGGGTGACCAGCAGGATGGGCACCAGCACG | | | | Rat | Human | |
| 2670 | cg16434657 | ATTGTTTACTTATCTGCGGGAAACATATGTCGGGAGAAGTTCACATTCCG | | | | Rat | Human | |
| 2671 | cg16528216 | CGCCCAAATCAATGTGGTTTCTTTGGAACATTTTCAGCAAAGGAACGCAT | | | | Rat | Human | |
| 2672 | cg16549948 | CAGCTCACTGGGCTTGAGGTTGGGGTCTATGATGAGCTCCCAGCTGTCCG | | | | Rat | Human | |
| 2673 | cg16589235 | CGGCCAGACGTTGGAGGCAGCTAAAGCCACATCAAAGCTTTCCTTGAAAT | | | | Rat | Human | |
| 2674 | cg16590183 | CGGGAGCAGAAATTGCCTGTCCGGTTTTATGATCTGCTCAGCCTGAGCAG | | | | Rat | Human | |
| 2675 | cg16642472 | CGGAACCTCACTTACATGGTGACCCGCAGGGAAAAGATTAAACGGTCTGT | | | | Rat | Human | |
| 2676 | cg16679083 | CGCCGGTGCTCATCTCCATCCTGCTCGGCGCCAGCTTCAGCCGCTACCAG | | | | Rat | Human | |
| 2677 | cg16680249 | CGCCGAGTTTTATTCTGTCCTGTGGCTCAGAGTTGAAGTTCCCCAAGTGA | | | | Rat | Human | |
| 2678 | cg16694303 | ATGATTTCTGTCAAAATCATCTTTACCACAATTATAATATGTTAATTACG | | | | Rat | Human | |
| 2679 | cg16723516 | AGCACGCACAGCAGAGCCCTAGTCGATAAGAAGTTGCAAATCAGTATTCG | | | | Rat | Human | |
| 2680 | cg16725457 | CGACATCAGTGGCAACGTCCTCGCTCTGATCTTCAACCAAGGCATGATCT | | | | Rat | Human | |
| 2681 | cg16770315 | CTGGGCGGCCGCTCTGCAGGAAGCAGTAACCGAGACCCTGTCTGACTACG | | | | Rat | Human | |
| 2682 | cg16785087 | CGCTTATTAAAGTCAAGCATGTGTCTTTGTTTCATGTTGCTAATGATGTG | | | | Rat | Human | |
| 2683 | cg16821706 | CGCCAGTCTGTGATTTAGCTGTCGCCAGACACCCCATGTTTTTTGTGAGA | | | | Rat | Human | |
| 2684 | cg16966998 | CGTACTGGTTTCTGCAGTCTCGTACTCGCTGTCTCTGAGAAGCTCAAAGA | | | | Rat | Human | |
| 2685 | cg16983152 | CGCTCAGCCGCCGGAATCGCAGCCACTGCCGGCTTCACAGACGCCTGCCT | | | | Rat | Human | |
| 2686 | cg17012009 | CGTCTTCGTTGCCATAGAAACCAAGGCTACCTTTGGGCTCATCCGGAGTG | | | | Rat | Human | |
| 2687 | cg17092784 | GTTCATCCAGAGCAGCTTCCTCCGAGGCCATGGATTACATTAAAAGAACG | | | | Rat | Human | |
| 2688 | cg17219049 | AGTTTGGGGCCCCAGGCTTTCACTCCCATAATTCTAACAGGGCAATCACG | | | | Rat | Human | |
| 2689 | cg17225945 | TGTTCAGGCTACTGTTGATGCAAATACTACTGCCATTCGCGGCAGCAGCG | | | | Rat | Human | |
| 2690 | cg17254187 | GAGCAATGTTCTGTGATGGTGCCCGAGATGCGTGGACTGAGCCCAGACCG | | | | Rat | Human | |
| 2691 | cg17322734 | ATTTCACAGTACACGCTTTCAAAAGCAGTCTCAGGTGGCCTGATGAAACG | | | | Rat | Human | |
| 2692 | cg17326640 | GCATAGCCAATAGCTCTGGGGCTCCTGCTACTGCGCGCTGATTGTTACCG | | | | Rat | Human | |
| 2693 | cg17489004 | CGGACCCCCTTGTAGATATAGAAGTACAGCTCCCGGCCCACATTGAAGCA | | | | Rat | Human | |
| 2694 | cg17502250 | CGTGACCTCTATAATGCTTCTTAAATTGAGGACAATGATGGACCCACCAA | | | | Rat | Human | |
| 2695 | cg17613601 | CGGACCATTAGTTACATATTTGAACCAATAAGGAAACACTTACCGAGCGC | | | | Rat | Human | |
| 2696 | cg17655329 | CCTGTGACACCAGCTAAATTAATCACTCACTGCACTCAGGGAAGTCACCG | | | | Rat | Human | |
| 2697 | cg17760546 | CGGTTTGTATTCTCCTACGGCTTTTACAGAAGTTGCAGTGATCCAAAGTC | | | | Rat | Human | |
| 2698 | cg17876669 | ACTTTACATTTTGGAGACAAACCTGTGTGAGTTTTTTATTGGTACAAACG | | | | Rat | Human | |
| 2699 | cg17876895 | ATCTGCACCCTCAAGGTGTTCCAGGACAGCAAGGCCTGGGAGAACTTCCG | | | | Rat | Human | |
| 2700 | cg17915458 | CGTCCTCTACCTGAACCCCGATGGACTGGAATTTGGTAGCGGGACTGGGC | | | | Rat | Human | |
| 2701 | cg17995270 | CGCCATGGACCTGCTGCGCATCCCAGGCCTGCTCATGTACATGATCCGGC | | | | Rat | Human | |
| 2702 | cg18111337 | GGACACCCTGCTGGTGTCTAGGTAGGAGTTGGAGTGCGTCCCGGTCTCCG | | | | Rat | Human | |
| 2703 | cg18120532 | CGGAATTATGATACAGTGGAGCCTTCACGCAATTCTTTGTTGAAGAAGTT | | | | Rat | Human | |
| 2704 | cg18141729 | CGCGGGTCACAGATTGAATCAATTGTCCAATCTTGTGAAAGTCATATCCT | | | | Rat | Human | |
| 2705 | cg18147524 | TAATGAAATGAAGCACAGATCTAAAGATTACTCAGCCCCTTTGTCAGTCG | | | | Rat | Human | |
| 2706 | cg18166816 | CGGGGGTTTATTTGATCTCACATTAACCAAGGAGGAGAATGTGAGAAAAG | | | | Rat | Human | |
| 2707 | cg18280269 | TTAATTCCTTTGTTAATGTCTTTATGAATGCAATTAACACTTCATTCACG | | | | Rat | Human | |
| 2708 | cg18425696 | CTCTCGTTGCCACGTAGCAGGTCGCTCTGGGGCAGGGACCACAGGAACCG | | | | Rat | Human | |
| 2709 | cg18462586 | CGGACCTCCTTGCTAAGCACCACATAGGAGAGGAAGATGAAGGGGCCCTG | | | | Rat | Human | |
| 2710 | cg18465972 | CGGCTCTTTCTGGGTTATCAGGCGCCAGTCCAAGTCCTCCCAGGCAGCCA | | | | Rat | Human | |
| 2711 | cg18466140 | TAGGCCGCAAATCGCGCTGAGCCTCCCTAAGTGACAGCGAGAGAATCGCG | | | | Rat | Human | |
| 2712 | cg18484878 | CGCTCCTTGCTCTGTAAAGTGGATGTCAGGTGGATCTATGTTTCTGAAGG | | | | Rat | Human | |
| 2713 | cg18496572 | CGTCACAATAAGTGGTAGTAATAGAACCATATACAGGATTGTAAATACAA | | | | Rat | Human | |
| 2714 | cg18775165 | AAAAGAACTTCAGTGGCGTAAACACCGTTTGTGCTGTGTCCCCAGCCTCG | | | | Rat | Human | |
| 2715 | cg18856868 | TTGAACTGATTTCACAAATACCCTTTCATTTCACTACTTCATTATGCTCG | | | | Rat | Human | |
| 2716 | cg18862976 | CGCCTGACTTTTACCAACTTCAGCACGCCAGCTGAGGCCTATCCCAGCTG | | | | Rat | Human | |
| 2717 | cg18961099 | CGTCCCTTTCAAAGTCTCCGAGTTCTTCATGCTTGTTGTTGAGATTTGAG | | | | Rat | Human | |
| 2718 | cg18987102 | ACAGCTCACTAATTAATTAGCGCTTAAGTACTTAGCATCCTCCTGCATCG | | | | Rat | Human | |
| 2719 | cg19067187 | CGTTTGATTAGTGCTACAAAAATTTAATTAGGTTGGCTAATTACTTGACA | | | | Rat | Human | |
| 2720 | cg19078816 | CGGTTTGGTTTCTTTAATCATTAGTTGCAGCGATGCGCTGGCAAACCCAG | | | | Rat | Human | |
| 2721 | cg19091932 | CGCGGATGAAATTAGCACTTCCTGCTATGTCGGGCAGATAAACTTTGCTG | | | | Rat | Human | |
| 2722 | cg19093840 | CGCAAGTTGACGGAGGCTTTTGATTGAATTGACTGATTGCCTCAGCTGCA | | | | Rat | Human | |
| 2723 | cg19117941 | AGATCTCGCCTTTCCAGATGCAAAAGTTCAGCCCCTCTGATGTCATGACG | | | | Rat | Human | |
| 2724 | cg19142100 | ATGATCCTGTCTGGCTTGCCTGCCCCAGATTTTATTGATTACCCTGAGCG | | | | Rat | Human | |
| 2725 | cg19169532 | CGTTCATGGAAGTGTGAAATGGCAAACAGGTGAATGTCCAATTACACTGT | | | | Rat | Human | |
| 2726 | cg19171923 | TTTTGACAGCGATCATTTGCTTCCTCTGCTGGATGATCTCTACCAACTCG | | | | Rat | Human | |
| 2727 | cg19239233 | TTCTTATTCAAAACAGGCCCACAATGGGCTTCACAGTGCGCCTCGCCACG | | | | Rat | Human | |
| 2728 | cg19261448 | CGCCTAAGGAGGCATAAAAGGCCACCAGGAAATAAATTAAAATTAAAATA | | | | Rat | Human | |
| 2729 | cg19302474 | CCCATCCTGCTGGGTCAAGTAGGATTCCATTTCAATTTCTTTACACAACG | | | | Rat | Human | |
| 2730 | cg19355190 | GAGTTACTGGGATTTTGTCTACGGCCTTGGCGGTCATCATTTGCTCCTCG | | | | Rat | Human | |
| 2731 | cg19367422 | CGAAAGGCAAGAGAATTTCTTCATTGCCCTTGGTGAACCGAAATGGATGG | | | | Rat | Human | |
| 2732 | cg19510597 | GGGCATCAGGTGGTAGTTCATGGCGTCCAGCAGCAGCTTCTGGCAGACCG | | | | Rat | Human | |
| 2733 | cg19641802 | ACAAATGTGGCTGCTGGGGAAAGTGACACGGGCTCCAGGTGATGGATTCG | | | | Rat | Human | |
| 2734 | cg19702785 | CGGGCTTCTTCCTGAGCCTGCTGCACTTCTACCGCACTGGCCACCTGCAC | | | | Rat | Human | |
| 2735 | cg19723657 | GCATCTACTGCAGTGAAGGCACTTGTAGCATTATGGTGACAGCTGCCTCG | | | | Rat | Human | |
| 2736 | cg19755091 | CGGCACTTGCAAGATATGGTTGCCGTAGCAACAGGCCTTCTAATCTGGTA | | | | Rat | Human | |
| 2737 | cg19773399 | GGACCTCTATTGCTATATCTTGGAAGCCACCTTCTTGATTTCCACTGACG | | | | Rat | Human | |
| 2738 | cg19778148 | CGGTTGTAATTCAAATCTAATTCAGAACATCTTAGCACCGGATCTGTCAG | | | | Rat | Human | |
| 2739 | cg19795032 | TTAGCAAAAATCCTATGAAAGACTGTTGGGAACAGAGCAGCCCGTAAGCG | | | | Rat | Human | |
| 2740 | cg19890585 | ATGGTGAGCTTCTCCGCCAGCTTCTGCTGACTGGGCTGCAGCACTGAGCG | | | | Rat | Human | |
| 2741 | cg19897940 | CATTGTTCCCGGCTAGCTCTTATCTCCCAGGAGCAAGTATCCTGTGTGCG | | | | Rat | Human | |
| 2742 | cg19945840 | GCCAGGCCAGCATGGCCAGCACCTTGGCCGTGAGGTTTTCGTAGGCGTCG | | | | Rat | Human | |
| 2743 | cg19950962 | CGCGCCCAGTAGAATATTGTATTAGTTGGTTGTGAGCTGTGTTCTCGTCA | | | | Rat | Human | |
| 2744 | cg20093263 | CGTTCTGTTCCAATAACCTGAGAAAAGTTTATGGACATGCCTTGCTGCCT | | | | Rat | Human | |
| 2745 | cg20144788 | CGCCGGGTATTTTCCCAGGTAGCTTAGAGGGGAACCTTGTAAGACATGGA | | | | Rat | Human | |
| 2746 | cg20161627 | CGTCCCAGGGCAAACCGGATGTGAAATAGGCGGTGACTTCATGCCAGAGA | | | | Rat | Human | |
| 2747 | cg20206504 | CGCCGGATTATACGTGGCCGATTCCCAGTGATTGCCCTGCTACACAAAGC | | | | Rat | Human | |
| 2748 | cg20264796 | ATCATTAAGGTTCAACAGCATTCAGAAGCTCAAATCCAATCAGTTTGCCG | | | | Rat | Human | |
| 2749 | cg20538492 | CGGCAAACTGAAATTAACAGCTACTGGAGCGCATTAATAATCTGCCTCAC | | | | Rat | Human | |
| 2750 | cg20593457 | CGAGGGGTTTGCTGTGGAATAAAATTAGATTCCAACATCTGCCACCATTA | | | | Rat | Human | |
| 2751 | cg20656650 | CGGGAAGGGGTCCTTTGGACAGGTGGCCAAGTGCTTGGATCACAAAAACA | | | | Rat | Human | |
| 2752 | cg20677676 | TATCAGCGTCAACTATCGCTTCCTCTGCTGGTACACACGGCCTGATGCCG | | | | Rat | Human | |
| 2753 | cg20728571 | ACAGTGGGCGTATTTTATGGAAAGCAGCCGACAATCAGTGTTTGCAGACG | | | | Rat | Human | |
| 2754 | cg20757950 | CGCCATTTGTCAAAGTCAACCTTCTGATTGCTTTGGACCTACTGCTATCC | | | | Rat | Human | |
| 2755 | cg20829742 | CGAAATGAAAACTTAATTCAATAATAAATGAGCTTCAGAGCAGCACAAGA | | | | Rat | Human | |
| 2756 | cg20844381 | AAAAACATTTATTAATATGCAAATTCTAAGTGGCAATCTGGACCCAGTCG | | | | Rat | Human | |
| 2757 | cg20850964 | CGGCGACTCCGTTCAATTTTGGTAACAGTCTGGCAAGTGCAGGTAGATAC | | | | Rat | Human | |
| 2758 | cg20860111 | AGATATAAATAACATTATCTGAGGAGGGACATTCCTGCCGGGGGACATCG | | | | Rat | Human | |
| 2759 | cg20951495 | CGAACCACCACAGGCCTCTCACTGCCAGCCACGAAGCCAAAGCCATATAT | | | | Rat | Human | |
| 2760 | cg20984125 | CGGAATTTTGTCCTGGATAACACAGATCGCAAGGGTGTCCATTTTCTGAT | | | | Rat | Human | |
| 2761 | cg20989633 | AATATCAAAGCAGGCAATGCATGTGTGGCTATGCCTCACAAAATAGGTCG | | | | Rat | Human | |
| 2762 | cg21026697 | AGTTAATTTGGCATCTGTATTTTTTACAACCCCGCACACGTAGCCCAACG | | | | Rat | Human | |
| 2763 | cg21057587 | CGCTCCTGGCCCCGGTGATTGGCTGCTCAGCTCTGACCCCACTTGGGCTG | | | | Rat | Human | |
| 2764 | cg21098898 | CGTATCTTTATTTCTAGCACATTAACAAAATATCACAAATAAATTGTCCG | | | | Rat | Human | |
| 2765 | cg21115959 | TAAACTCTCTCCTGTCTTGGACGGGGTCTCTGAGCTTCGTCACAGTTTCG | | | | Rat | Human | |
| 2766 | cg21119395 | CTGGGACAGTGTGTGCTTGCAGGTGTCTCTCAGATACGTGCTACCTGTCG | | | | Rat | Human | |
| 2767 | cg21219688 | AGTTACCGCTCTCAAACCTACCAAAACTACAAAAACTTTAATAGCAGACG | | | | Rat | Human | |
| 2768 | cg21229874 | CCAATGAGATTTGAAAATGGCCTTGAGCCGCAGCCTCCTCTCGGGTCACG | | | | Rat | Human | |
| 2769 | cg21308134 | CGCCATTAAGTCCCGATAGACAATACCAGAGTGGTTTTCTTTCAACTGTG | | | | Rat | Human | |
| 2770 | cg21332416 | TCCAAGAAGTACAACATCCTGGGTACCAATGCCATCATGGATAAGATGCG | | | | Rat | Human | |
| 2771 | cg21508838 | CGCGGGAGACCAAGGTAATGATGATGTCATGAGAAATCTCAAGTACATGG | | | | Rat | Human | |
| 2772 | cg21523490 | CGCGCGGGGACCTAATCCATCAAATTGTCTACAAATTGTGAAGAAAATTC | | | | Rat | Human | |
| 2773 | cg21583851 | TGTGTTACAGAGTACAGTTGCTGTGTTGCAGAATGTTAAAAACCTCAACG | | | | Rat | Human | |
| 2774 | cg21603943 | CGTCCGGTCTGAAGTTTCTCCGAGTAAACAAGGATGAGGGACAAAAGCCA | | | | Rat | Human | |
| 2775 | cg21658655 | CGGCATTGTGGTTCATGTTTGAAATTACAGATTTTAAATGCCATGTTCAT | | | | Rat | Human | |
| 2776 | cg21663142 | AACCATGTAGGCCCTGCAAAGGCTACCAGTCCATCTCTCCGTCTTCGTCG | | | | Rat | Human | |
| 2777 | cg21674021 | GACTGTTAGCAATCAGAATGCTTTTTATATGGTGTCTTTCTTTGGAAACG | | | | Rat | Human | |
| 2778 | cg21685750 | GAGCCCAGTGGGAGGTGGAGCGGGCGGAGCTGCAGGTAAAGACCCTCCCG | | | | Rat | Human | |
| 2779 | cg21694863 | ACTTTGAGACATGGCTTGATAACATTTCTGTTACATTTCTTTCTCTGACG | | | | Rat | Human | |
| 2780 | cg21743335 | CGGCTAATAAGTTGTCTGACAAGATAGCCACTTTGTACCTAATTGTTCAG | | | | Rat | Human | |
| 2781 | cg21760034 | CGCACGGACATCCTGTGCAACCTGCCCAGCTACAAGGCCAAGGTGAGAGA | | | | Rat | Human | |
| 2782 | cg21878650.1 | CGGCTTACTTTAGCTACTTACGCTGGACTGTCACAGTGTCTTAGGGATGA | | | | Rat | Human | |
| 2783 | cg21900509 | CGACCTGGAGACAGCTTTTGTGTTATCCTGTCAATGGTTATAGAAGGATA | | | | Rat | Human | |
| 2784 | cg21907579 | ACTCGTGACGTCTCCAAGTCCTATAGGTGCAGCGGCTGGTGAGATAGTCG | | | | Rat | Human | |
| 2785 | cg21917735 | TTAATAAGAATCTGGGAAGTATCTGTCTTTGCCGGCCGCTTTCATTTGCG | | | | Rat | Human | |
| 2786 | cg21926612 | TCTGGATCAACCTGGGCACTACGAGGGGTTGAATTTCTACCATTATCGCG | | | | Rat | Human | |
| 2787 | cg21940324 | ACTATATCCGTGCATCTTTTTAAGCAGATGAGGTCCAGCGTGCTCCAGCG | | | | Rat | Human | |
| 2788 | cg21956876 | CGCCTTAAAAATACGAAAATAAATTTTACAAGGTTTCTGTTTTGTGTGGA | | | | Rat | Human | |
| 2789 | cg21960684 | CGGCCCTGGAGGAATTCCCAGTGTAAACAGGGAATTCTCTAAGGGAACCC | | | | Rat | Human | |
| 2790 | cg21993706.1 | TCTCTGACAGATGTGTGCCCAATCACTGTGAGCATGGTGGAAAGTGCTCG | | | | Rat | Human | |
| 2791 | cg22000069 | GAGATGGCGGATCCAGCCGAATGCAGCATCAAAGTGATGTGCCGGTTCCG | | | | Rat | Human | |
| 2792 | cg22044223 | CGGAAAGTAATTAAGGAAAACAAGTTTGAAACTGCTGACTTCAACCCTTT | | | | Rat | Human | |
| 2793 | cg22048239 | ACTTAAAACTGGGGTCAGGTGGAAGTCTCACAGAGACCACGTCTGTACCG | | | | Rat | Human | |
| 2794 | cg22097793 | TGCATCTTCCCTTATTGAAAGGTTATTTTATGCAAGTAAACAATTCATCG | | | | Rat | Human | |
| 2795 | cg22110517 | CAAGTTTACTTCATGACTCTGAACCGTAACTGCATCATGAACTGGTGACG | | | | Rat | Human | |
| 2796 | cg22171829.2 | TCACCAAAGTCCAGTAGCTGCTTCATGGACAGCGGGGACGGGCTGTAGCG | | | | Rat | Human | |
| 2797 | cg22177193 | CGCAGTTTTGAAGAAGTATCAAAGTAGGAGAAGAGTGAATCTAGCTCATC | | | | Rat | Human | |
| 2798 | cg22373432 | CGCAAAGGGGGAGAATCACCCGTCTCCTAATTTTAACCAGTACGTGAGGG | | | | Rat | Human | |
| 2799 | cg22375533 | TATCACTTTCTCTTCTTAAAGCAAAGAGCAAATCGCCTGTAAAATCTACG | | | | Rat | Human | |
| 2800 | cg22450471 | CATATGTCCAAGCCTGCGGTGCTGGGACTGAGCATGATTATACCCCGACG | | | | Rat | Human | |
| 2801 | cg22493172 | GGGCGGTGCAGCATGCGGCAAAGCTCTTTGCATAAATTATGCTCATGACG | | | | Rat | Human | |
| 2802 | cg22533021 | GCCCACCGGTGGGGACAGTGTGGCATTTCTTATGCTCCAGCAGCTGTTCG | | | | Rat | Human | |
| 2803 | cg22598501 | CCTCTTGTCTCGACAACTGTAGATATTTTGTTTTCCTTCTTTCTCTCTCG | | | | Rat | Human | |
| 2804 | cg22684134 | CGCAGCACAAGGCAATTTTAAAATCCATTCTGTAAAAGCAACACTGTTTG | | | | Rat | Human | |
| 2805 | cg22689219 | AATGTAAAATCCCATATGCTGTTATACAGTATGTTGCAATCTGTTTTACG | | | | Rat | Human | |
| 2806 | cg22738179 | GAAAGCCCTACGGCGCACTGCAATGTGCTGAACTGGGAGCAAGTGCAGCG | | | | Rat | Human | |
| 2807 | cg22900813 | CGCATGTCAGAGAGGTTGCAGGCTGTTTTCAATTTGTCAGTTTGTGGATG | | | | Rat | Human | |
| 2808 | cg22935821 | GCAGGAGGCAGCTGCATATCTGCGGTCCCGACCACAATTGCTGGGAGTCG | | | | Rat | Human | |
| 2809 | cg22944122 | TCTGGCTCTGACTTTCACTCCGGGGCAACAGTAGCACCAAACCACATACG | | | | Rat | Human | |
| 2810 | cg22949164 | AGGGCTCTGATTCAGAAAGATCATCGGATCCGTCTGAGCTTGGCTGGTCG | | | | Rat | Human | |
| 2811 | cg23045679 | CGTGTTTATAGTACAGTAAGTGGTCTAGCAAAATTGTCCATGTTTCTTTG | | | | Rat | Human | |
| 2812 | cg23046555 | CGCGCCGGAGCGTGACTTTACAACTAATCCTGTTTGTAAGTTATTATTTA | | | | Rat | Human | |
| 2813 | cg23075119 | CGGGGCTGGCTCTGGGCCTCAGACACTCTGGAATCGCCAAGGTCTGAGCT | | | | Rat | Human | |
| 2814 | cg23119788 | CGCCCTTTTCAGGCGCAGACAACAGAACAAAGTATAGAGGAACAACAAAA | | | | Rat | Human | |
| 2815 | cg23126716 | CGCCAGCAGCTGCAACTTGGGGGGCATCATAATCCTGAGGAGCCCCATGA | | | | Rat | Human | |
| 2816 | cg23164054 | AGTGGTAACCATCCACCACTTGAGTCATCTCGGGTCATCACCACAGCTCG | | | | Rat | Human | |
| 2817 | cg23192185 | GTATTCGATTTGTTTGAGTCCCTTATAAAAACACTAATGCAGACCAGACG | | | | Rat | Human | |
| 2818 | cg23194111 | CGGGTGAAGTGTAATTTGTTTTTCTTAAGTTTAATACAGCATGTCAATAG | | | | Rat | Human | |
| 2819 | cg23352950 | CGCCAATCGATTTACCTCCAATGCAGGTGTGCTACAAATCCGCTGGGCCC | | | | Rat | Human | |
| 2820 | cg23442072 | GAGGATACCTCAGGCACTGAGAATGAGGCCTACTCCGTGGGCACTGGCCG | | | | Rat | Human | |
| 2821 | cg23449725 | CGCGCAGAAGCTCTTTGCGCACAGACATCTCTCCAAGGTGACCCATTTGG | | | | Rat | Human | |
| 2822 | cg23478212 | GAATGAGAAATGTTTATATGTTCTTAGTTGCTTTTAAATCTCCCTTCACG | | | | Rat | Human | |
| 2823 | cg23572376 | AAACTTCTGAACTTTTGAGCATCCGTCACCCAGGCGAGGACTTTTTTACG | | | | Rat | Human | |
| 2824 | cg23575948 | CTGCATCTTGATCCTCCTGTACGCCATGTACAAGTACAGGAACAGGGACG | | | | Rat | Human | |
| 2825 | cg23589509 | ATGCATTATACAGCTTGCTGTCTACATTGATCAAATTAATCAGAAAATCG | | | | Rat | Human | |
| 2826 | cg23595572 | CTGGCATGGCTGTGAGCAGACCCTGGCTCGCCTAAGAAATGCCGTGCTCG | | | | Rat | Human | |
| 2827 | cg23681447 | CGGCATTCGGCAACAGCTGTCACCTGCTATAATGTTCTTTAATTATCTTA | | | | Rat | Human | |
| 2828 | cg23691177 | CGGGCTGCATCAGCACTCAAATCTTATCTTGTTAAATCAGACAAATGTAG | | | | Rat | Human | |
| 2829 | cg23925713 | CGCAGACAATGTCCTCTGTGCTGTATTTGCCAATGAAAGTGGACAACAAC | | | | Rat | Human | |
| 2830 | cg23976192 | GGGCTCCATAGCTCAGGGGTTAGAGCGCTGGTCTTGTAAACCAGGGGTCG | | | | Rat | Human | |
| 2831 | cg23977950 | TGCTGCGTTATCAGCCTATTGATCATGTGTCGCCTGTAATAGGACAGGCG | | | | Rat | Human | |
| 2832 | cg24005961 | CGGCGGCGTGGGGTTCGCTGTGTGACACAATTACAACAACTTTGTGCTGG | | | | Rat | Human | |
| 2833 | cg24039358 | CATCAAATTCATTTACGAGGTCCTCCATGGACTTGAAGCTGATTATTTCG | | | | Rat | Human | |
| 2834 | cg24040066 | TAAAATCCATTCTGTAAAAGCAACACTGTTTGCAGAGTTTGAAGAGCTCG | | | | Rat | Human | |
| 2835 | cg24078962 | TTTCGTTTTCAATAGTTATGGTAACAGCATTTCTCCCAAGCACATCTACG | | | | Rat | Human | |
| 2836 | cg24082321 | GTGCTCGTTGAGGCTCATCACCTCGGAGTAACTCTGGCCGATCCAGTCCG | | | | Rat | Human | |
| 2837 | cg24128008 | CGGCGTGTGAATAATTACAAAGTAGCAAGTATTTTTACATACAGCAAATA | | | | Rat | Human | |
| 2838 | cg24143986 | TTCTCTGCAGAATGTCAAACAAAGATCGACACATTGATTCCAGCTGTTCG | | | | Rat | Human | |
| 2839 | cg24230340 | CGGCAAGGGGAGTTTGTTGTTGCCATGGGAAGTCCCTTTGCACTGCAGAA | | | | Rat | Human | |
| 2840 | cg24231456 | CGCCAAATGTCTATGTTCTTGCGCTGGGCTTTCGAGAAATGGTCCCAAGC | | | | Rat | Human | |
| 2841 | cg24243964 | CGCTGGGGTGATTTCTAGCATACTTTATCATGTATCAATATATACTCTGT | | | | Rat | Human | |
| 2842 | cg24257227 | CGCAGCTGCATGGACAGCACGGTGAAGTACATGAATTTCTACAAGATCCC | | | | Rat | Human | |
| 2843 | cg24288746 | CGCTTGTGGCAAAATAGAGGTAACCTTGTTGCAATGCTTTATAAGTTGGT | | | | Rat | Human | |
| 2844 | cg24467057 | TTTGGGAGGTGATTAACAGCAATCACGCTTGAGTTTGACATCCAGGCACG | | | | Rat | Human | |
| 2845 | cg24470284 | TTTTCTCTTCTTGTAATCGCTCCACCAACTGCTGAGGAATATCATGGTCG | | | | Rat | Human | |
| 2846 | cg24545466 | CGTGATCAGGAAAAAGGAAATGAAACCAGAGACAGAGGGAAGCTGAGCGA | | | | Rat | Human | |
| 2847 | cg24545857 | GATTTTTCTTTATCCTCATTAAAGATCCCAGGTGCAGACAAAGCTTTACG | | | | Rat | Human | |
| 2848 | cg24560242 | AACAGCACTTTCCTAAACTATTGTATTTATTAGCAACCTGTTGCCCTTCG | | | | Rat | Human | |
| 2849 | cg24620051 | TAGAGTCAATCAATTATGAAGGGAACAATCTGGCGGCCCCTCGGGGAGCG | | | | Rat | Human | |
| 2850 | cg24688511 | CGGTGCGTAATGGTGTGGTATTAAATTCTAATTAGAGATGCAGGAATCAA | | | | Rat | Human | |
| 2851 | cg24737665 | CGTGATTTAATGGCTAATCTTACACTGCCCCCTGGTGGGCGTCCATAGAC | | | | Rat | Human | |
| 2852 | cg24790812 | CGCTGAAGTCAGTGGTGTTAAACACCAGCTGTGCTGGCAGAGAAGCGTGG | | | | Rat | Human | |
| 2853 | cg24967047 | TCGATGACCAGGTCGATGGGCATCTTTCCCTTGAGGCAGGTGATGTAGCG | | | | Rat | Human | |
| 2854 | cg25000361 | CGCTTCTTTTTTCCTATCTTTTCTTTTTTCCCCACTTTTTCTTCTCTGCG | | | | Rat | Human | |
| 2855 | cg25007568 | CGCTGCGACATCTGCCAGATGCCCTTCAGCGTCTACAGCACCCTGGAGAA | | | | Rat | Human | |
| 2856 | cg25019710 | CGCCTCTGCTTCAATGTGGGCCGGGAGCTGTACTTCTATATCTACAAGGG | | | | Rat | Human | |
| 2857 | cg25028274 | CGCGTGGGGCTCAGAGCAACAGGTGGGAGTTTCAGAAGCATTCTGGTTTC | | | | Rat | Human | |
| 2858 | cg25053457 | CGATCACACTTGCTATGAAAGTGGCCACATACCAAATCATAGTACTACCG | | | | Rat | Human | |
| 2859 | cg25179135 | CGCCAACACATGGCACCCCCAGCCCCTGCCACGCCCAGCAAGAGCAGCGC | | | | Rat | Human | |
| 2860 | cg25231972 | CGAGCATTTAGACACAAGCGAGAGGATCATGGCGGATGGCCCCAGGTGTA | | | | Rat | Human | |
| 2861 | cg25237345 | CGGCTCTTGCTGCTCATTGGGGAGGTGACACAAGTGGGTGATAGTGGCTT | | | | Rat | Human | |
| 2862 | cg25322223 | TACGCCAAAACCCACATGATCTGTAACGTCAGCATGCGTATTTGCATACG | | | | Rat | Human | |
| 2863 | cg25431896 | TTTTATGTACCGAGTCTCTTATCCGTCTCTCCTAATGACTTCCCTTAGCG | | | | Rat | Human | |
| 2864 | cg25558063 | ATATCAAGAGGATGGATTCGACTTAGACTTGACCTGTATCCATTTCTGCG | | | | Rat | Human | |
| 2865 | cg25592264 | GTCAAACTCGAGGTCTGGGTTCTTGCAGATCATGCCCGGCATGGTGGACG | | | | Rat | Human | |
| 2866 | cg25670428 | CACTGGAGCCCTGCCTCTTCCTGGCAGGGAGCATCGAGTACAGCTGTCCG | | | | Rat | Human | |
| 2867 | cg25776150 | CGGTTGATGTGGTTAGCTAACTGCCCTGGGCCCTGTATTGGTTTTGCTCA | | | | Rat | Human | |
| 2868 | cg25836301 | CGGCTAGAGCAATTTGTCATAGAATCTGGGGGGCTCATTTTTCCGGCCAA | | | | Rat | Human | |
| 2869 | cg25843357 | CGCCGCCGCCGCCGCCGCACTATAATTTTCCAAACAGGATCTTGCAATCA | | | | Rat | Human | |
| 2870 | cg25889693 | CGTCCATCAGCGACGGCGGTAATTAGGGCTTTCCAACCCCAAATGTGGGC | | | | Rat | Human | |
| 2871 | cg26039561 | CGCTGCTGGCTTTGTCTTAATTAGGCACTATTGATGGAAACAGGGAGGGC | | | | Rat | Human | |
| 2872 | cg26041637 | GGGGTATTTTAGTGACGCCTGGAACACGTTTGACTCCCTCATCGTAATCG | | | | Rat | Human | |
| 2873 | cg26101296 | TTGTTTCCAGGTCATATTTAGGGTTCACATATTTGCATAAAAGCATTTCG | | | | Rat | Human | |
| 2874 | cg26112867 | CGAAGGCGAAGCCCCGGCTCTGACCTGGAGACAGCATTCAGATACAGACG | | | | Rat | Human | |
| 2875 | cg26138622 | CAATTTCTCCCTTTTTAACACCAGCATAATTGACTTTGTACCATCTGCCG | | | | Rat | Human | |
| 2876 | cg26227545 | GCCTTGAAATTAGCGAGGTAGAATGCTTGGGCTAATTATGCATTCAAACG | | | | Rat | Human | |
| 2877 | cg26294925 | CGAACCACTTTCTGGGGATTAAGCGCATGGCTAAGCCTACTGGACCAGAC | | | | Rat | Human | |
| 2878 | cg26307512 | CGGTTGAGGTCACTAAGCATCTGGTTGATTTGGGAAGTGTTCTGAAGCAC | | | | Rat | Human | |
| 2879 | cg26417435 | CGCCGGGGCCGGAATGGCACAAAGTCCTCATCATTGGGGTCATCTACCAT | | | | Rat | Human | |
| 2880 | cg26496365 | CCTTCTAAAGAACCAAAGCCTGTTGGCTTAAACAATAAAGAGCGTTTCCG | | | | Rat | Human | |
| 2881 | cg26499416 | GCAATACAGCTACTCACGTAGCTAAAGGGGCCTTCATGTCCTTACTTTCG | | | | Rat | Human | |
| 2882 | cg26522240 | CGCCCTGAGCGTGAGCATCATGTGAAAACGTGATCGCCAAGTTTCTCTCT | | | | Rat | Human | |
| 2883 | cg26621696 | CGCCTCCCATGGACCCTTCTAACTTTGTCACCATGATGGGCATGGGGGTG | | | | Rat | Human | |
| 2884 | cg26625831 | CGGATCCTGGGAGCTGTGGCCAAGGTCAGAGAAGCCTTCCAACCTCAGGA | | | | Rat | Human | |
| 2885 | cg26674451 | CGTCAGCAGCAAAGTGGTTCGTTACGCCTGATTGGTCTAATTGCTTTGAA | | | | Rat | Human | |
| 2886 | cg26747497 | CGTCTGCGCCCACATCGTTGCTGACCTTGCAGAGGTAGTAGCCACTGTCT | | | | Rat | Human | |
| 2887 | cg26768458 | GGGAACCAGCCACAATTGGCTATATTAATAAATAACTTTCCTCACAGTCG | | | | Rat | Human | |
| 2888 | cg26770198 | CGGTTCACTCAAGTAAAGCAGTTTGTATGGTAATTAAGGGAGCATTTTTC | | | | Rat | Human | |
| 2889 | cg26813228 | CGGGCATATGACCACAGTATCACAATCAAGAAATTTTAAGACAACATTAA | | | | Rat | Human | |
| 2890 | cg26843878 | CGTGCTGCTGCTGCTGCAGGCCATCCTGGGCTCCATGGTGAACGCCTTCA | | | | Rat | Human | |
| 2891 | cg26914546 | ACATTTAAACAAAGTGACACAGATCATCAGCAGATCAACTGGGAATGACG | | | | Rat | Human | |
| 2892 | cg26973329 | CGGCATATGGAGATTATATACTTTTTTGAATATCGTTTCCCAAAGCCTGC | | | | Rat | Human | |
| 2893 | cg26976812 | AATAAAGCAAATTATTCCCGTCTTCAGAAACGATCTAGACTAATTAGTCG | | | | Rat | Human | |
| 2894 | cg26984049 | CGCAGCAACAATAGCAGAGGAACAGCTCTGCCTGGTGACGTAATGGCTGG | | | | Rat | Human | |
| 2895 | cg27050569 | CGACAGAACTGATATTTTATATTGAAATGGATCCTCCAGGTACTTGGGAG | | | | Rat | Human | |
| 2896 | cg27075086 | AGTCAAGGGAAACCTCATTAGAGAGGATTTTCTTAGTTAGCAGGGCTTCG | | | | Rat | Human | |
| 2897 | cg27151981 | CACAGTGATGCACAAAGAGGTAACTTCTGTAAGGCTCTCTGATATAAACG | | | | Rat | Human | |
| 2898 | cg27152481 | CGGCAGCGGCGATGGCTACAGAAGGAGGGAAAACCTCTGAGCCAGAGAAT | | | | Rat | Human | |
| 2899 | cg27171735 | GAAACACTTATTTTCGGAATTTTATAGCTCAGCCACAAAAATTCACTCCG | | | | Rat | Human | |
| 2900 | cg27196467 | CGTCATTGTGCTTTTTGTTAAATTATTGGAACAGTTTGGGCTGATTGAAG | | | | Rat | Human | |
| 2901 | cg27216483 | CGGCCCTTATGGCGGGCTGTCAAACTGTTTTGGCTTCCCCGTTATTACTT | | | | Rat | Human | |
| 2902 | cg27236661 | CGCGGGCAGGCAGAGAAGCACCACACAAGAAATTGATTCCATTAAAAAGT | | | | Rat | Human | |
| 2903 | cg27248455 | GGGAAATATATATTTATATAGATACTCTAATATAGACCACATCTCACCCG | | | | Rat | Human | |
| 2904 | cg27251107 | TTACCTGGGAAACCTCTGCTTCAGCTTCCTCAGGCTCTGCCTGGTAGGCG | | | | Rat | Human | |
| 2905 | cg27295000 | CGGGCCCAAATCTTACAGGCTTGTGTTGGCTTTGACCAATGAAGTAGAAC | | | | Rat | Human | |
| 2906 | cg27484199 | CGCTTCAGGGATTGACTAAAACCTGTTCATGTATAGCAGCAATTTGAGAT | | | | Rat | Human | |
| 2907 | cg27495216 | TGGCATTGAGCTGGGCACTCATGACTCGCTCATGATGTGAATGGCTATCG | | | | Rat | Human | |
| 2908 | cg27531392 | CGGCTCAGCTAAATGCGTGCTGAGTGCTTCAGCCTTAAATAGGGAGAAAA | | | | Rat | Human | |
| 2909 | cg27538829 | CGCCTTCGAGATTGGGCTTTATGCCCTTGGCCTGCACAACTTTGTTTCTC | | | | Rat | Human | |
| 2910 | cg27587645 | CGCTGCGAGCTGAGCCCCTTGCCCACCAGGAAGTGCACGTCGCACAGCAC | | | | Rat | Human | |
| 2911 | cg27625359 | CGCATTATAAAAATATGCACCAGTTGCCAACATGTAATGAAATATTAAGA | | | | Rat | Human | |
| 2912 | cg08074329 | CGAGTGTCCGGCTTTTTGAATGAGCCACGTGTTCAAACTACAAATCAACG | | | | Rat | | Universal |
| 2913 | cg24055081 | AAACATGAATGAATGTGGAGGGCGGAGCCTGGGAAAACCCCTCTGCAACG | | | | Rat | | Universal |
| 2914 | cg24446586 | CGTGCTTTCGGTGAGAACACCGAGTGACGATCTGTTGCTTCCCCTGAGGT | | | | Rat | | |
| 2915 | cg16949290 | CGGTCTCTCTATGGCTGGGGCTGCCTCTGTACAATGGGATAAAATTCAAG | | | | Rat | | |
| 2916 | cg12220493 | CGCTGGATATTAGTAGATGAGGATCATTCTGCTTCAATTGGGCGCCTCTC | | | | Rat | | |
| 2917 | cg23009891 | AGAGGTTAGTTCTATTAAGAGTTCATCAATCACCCGGTGTGCACTTTTCG | | | | Rat | | |
| 2918 | cg06603975 | GCAGCTGAAGGCGCCCCATTAGCATAACACTGATGTTTAATTTTCATACG | | | | Rat | | |
| 2919 | cg10244777 | CGGCAAAAGTGTGGAGAAGATTTAAGCAAATGACTGTGTCAGCTTCTATT | | | | Rat | | |
| 2920 | cg01994205 | CGCCACGATGATGTCCATGAACAGCAAGCAGCCTCACTTTGCCATGCATC | | | | Rat | | |
| 2921 | cg02854502 | AATCAATTATTTGACACTAAGATACTCTCAAGAAAAACTCATCAGTTACG | | | | Rat | | |
| 2922 | cg19835617 | CGCTTGTTGTCCACAGTCAAGGAGGTGCCCTCGGGCAGCTCGGCCGGCTC | | | | Rat | | |
| 2923 | cg19376000 | CGTCTATTTCATGAGGTAGTTTGCATGTCCTTGAATGGAATCTCGTTACC | | | | Rat | | |
| 2924 | cg27166817 | CGCCAGGAGTGTCTCAAGGAGCAGATGGGTGCTACTTTGTTTATAAAAGA | | | | Rat | | |
| 2925 | cg06947421 | GACTGGCCATTTACGCCACCACTTTAAACAAAGATATTTGGTTATTCCCG | | | | Rat | | |
| 2926 | cg09434548 | AGGGTGGGAAGCACATGGGCCACTTTTATGTAACACTCCTCTGATACACG | | | | Rat | | |
| 2927 | cg19665414 | TTACTGGTGATCGCTGCCAAAACTACGTAATGGCCAGCTTCTACAGTACG | | | | Rat | | |
| 2928 | cg25817964 | TGCAGTGAATTTATGGCGGCCATCCATTAGCTCTTACCAAGGCAACGTCG | | | | Rat | | |
| 2929 | cg00127523 | AGCAGGCCTTCCTGGTCAGCCTCTACAAGTTCATGAAGGAGCGACACACG | | | | Rat | | |
| 2930 | cg14590156 | TCACGGGATTATATTGTTCGTTGAGTAGCAGCTTTCTGTCCCAGCTGTCG | | | | Rat | | |
| 2931 | cg20359340 | CGCCAGAAAGAGTCACTAATTATGATATGTATTTGCATATGTTTAATCAC | | | | Rat | | |
| 2932 | cg12274258 | CGTGATAAAACATTGATTGTTGCAGTTTGGTGACCCATGAAATTTGGGGG | | | | Rat | | |
| 2933 | cg22188736 | TCTACTCAATGGATTGTGGTCAAGGCCATTGTAACGTGAGCAGTGCCTCG | | | | Rat | | |
| 2934 | cg02005942 | CGCATTGTTTATCCCTATGAAATGTACCAGTCTGGAGCCAACCTTGTGGT | | | | Rat | | |
| 2935 | cg00462525 | GCAGGCGGGGCTGGTACTTGTGCAAGGACTGTAAAACCACCATCTGTCCG | | | | Rat | | |
| 2936 | cg00012521 | AATTTAAATTGCTTTTGTTCATTTTCCATACTACTCCCCACACTTCATCG | | | | Rat | | |
| 2937 | cg00110098 | CGCCTCTCTGGTGATCTGCACTTAATAGGAATATTTTAAACTATGTAGCT | | | | Rat | | |
| 2938 | cg00199273 | CGCCTAAATCATTGTTACACACTAATTAGTGCTGTACTCTGATTTGAGGC | | | | Rat | | |
| 2939 | cg00557947 | CGGATTCTATTTGCATCCGGAATCGCATGTACATGAAAAATGTGTCCGCG | | | | Rat | | |
| 2940 | cg00741609 | GGCTTCTTCTTCTTGGGGGGCGTCCGGTTCTGATAGGGGTGACCTATACG | | | | Rat | | |
| 2941 | cg01178121 | TTCCACCACAATTGTAGCTCCCTCTCCGGCTTTGAAGTGCCGCGGAGGCG | | | | Rat | | |
| 2942 | cg01198746 | TGAATAAAAGGAATTAACCGTTTCCCTCCTCTGACCTCTGGGAATTTCCG | | | | Rat | | |
| 2943 | cg01314094 | CGGCGGCTCGTGCTGGCATCTACGGGGATACGCATCACAACAAGCCGATT | | | | Rat | | |
| 2944 | cg01397139 | CGGGGGGATTGCTAATCGTATTCAGCATGTTTTGCACAAGAAATGTCAGC | | | | Rat | | |
| 2945 | cg01463338 | CGCTTCATGTCAACTACAATGGCACTGAATGAACAGGTTTCAGCTTTATA | | | | Rat | | |
| 2946 | cg01579023 | TCCCATCTCGGGCACTAAATGATCCCCACCATTTGCAGTAAATATATACG | | | | Rat | | |
| 2947 | cg01696865 | CGGAAAGTGTTTTGGTTTTCCTTGGACCTCGAAGAAGCTATAGAGTTCAA | | | | Rat | | |
| 2948 | cg01908395 | CGCCCTAATGGGACAAGCTCGCTCCCAGAGGAGTGACAATTCCTCCTAAT | | | | Rat | | |
| 2949 | cg03045079 | CGTCCTCTACCTCCACCAGGACCAGAAAGGGCCAGCAATCTGGCTTGGAT | | | | Rat | | |
| 2950 | cg03126469 | CGCAGAGACGACACTGCATGTTAGGGGGACCCCAAGAATACCACTGGTAA | | | | Rat | | |
| 2951 | cg03707960 | ACCAGGAGGTATTTACTGCTTCCTGGACAAAGGTCAGGTCCAAAAACACG | | | | Rat | | |
| 2952 | cg04986697 | CGAGCTTGTAAATACAAGCTCCGTGGACAAAGTCCCAAATGACATCACTG | | | | Rat | | |
| 2953 | cg05201058 | CGGAGAGCTGCAAGCCGGTGCAGCAGCCTTCAGCTTTTGGCAGCATGAAA | | | | Rat | | |
| 2954 | cg05907696 | CGTGTGAGAAAAGCCTGGGAACAAACGGGGCGCCTCCGTCTCCAAGAGCT | | | | Rat | | |
| 2955 | cg06053159 | CGGAGTGATTGTAAGTAACGCTTGCCTTAAGAATCTCATTATTGGAACAC | | | | Rat | | |
| 2956 | cg06071218 | AGCTGTGGGTGCTGATCTGGCTGTACTCGCAGTCTTTCATGGGCCCGCCG | | | | Rat | | |
| 2957 | cg06138703 | CGGGAAGAGGACTCCTTTGACAGTGATAGCACAGCCACCTTGCTCAAGTG | | | | Rat | | |
| 2958 | cg06493086 | CGGTCCCAGAAGTACTGCACAGCAATGGCAATGCCCCGGCTGGAGAAGTA | | | | Rat | | |
| 2959 | cg06509306 | CTTGAGTTCTTGGGAGCTGGTGGCCAGCATACTTCGAATGCTTTTGTCCG | | | | Rat | | |
| 2960 | cg07550523 | CGGCGCTGTGGCTCCTCCAGATAAAGCAGCGATTTCAGCCCAAATGTTTC | | | | Rat | | |
| 2961 | cg07665308 | TCAAGACGGCGCCAGGCAGCTCAGTGTTCGCAGACAGCTGTGGCGCGACG | | | | Rat | | |
| 2962 | cg07670450 | ATTTCACTTGGGGAACTTCAACTCTGAGCCACAGGACAGAATAAAACTCG | | | | Rat | | |
| 2963 | cg07887668 | TCTTCCTTTATTGTGCAGTAAATTTCCCTCCAGAGTTCGGATTTCATGCG | | | | Rat | | |
| 2964 | cg07919443 | CGGCATATTTGCTGCTTGGCTAGCCAAATAGAAGTTGTTTTTTGCACAAA | | | | Rat | | |
| 2965 | cg07963404 | CGAGAACAAGCCCATGATCCTGCTGGTGGGCCAGTACAGCACCGGCAAGA | | | | Rat | | |
| 2966 | cg08373745 | GTCCAGAGAAGTAAACTCTCTCCTGTCTTGGACGGGGTCTCTGAGCTTCG | | | | Rat | | |
| 2967 | cg08657007 | CGCAAGGGCAGGGACCCCCCACGAGATTCATGCAGCATTCAAAGTGAGTG | | | | Rat | | |
| 2968 | cg09311277 | CATTCAATTTCCTTAATTTATCCTTGAGTTTATTGCTGCTTTTGAAGTCG | | | | Rat | | |
| 2969 | cg09627707 | TGAGATTCCATTTTCACATTGGTTTGTGCTGAGCATATAAATTTCCTGCG | | | | Rat | | |
| 2970 | cg10302985 | CTGACCATTTAGATTTCAGAGGGATCCAAAACCAATTTAGACTCCAGTCG | | | | Rat | | |
| 2971 | cg10759434 | TAGCAGCACACACGGCATTTTCTCATTCTCACCTGCCAATGTCATCTCCG | | | | Rat | | |
| 2972 | cg11304240 | GCTTCCAGTTGGTGCAGGCCACCTTGGGCACGTAGCAGTAGATGAGCTCG | | | | Rat | | |
| 2973 | cg11448454 | ATGGGCCAGGTCTCCAGCTTCCTCGCTCCCATCCAATGATTTATTACTCG | | | | Rat | | |
| 2974 | cg12010100 | TGGAAGCGGTGAGATATGTAATGCTTTATTAAGCGGTCTCAGCTACAACG | | | | Rat | | |
| 2975 | cg12101354 | ATTCATTTCCTTGGGAGCACTGCAATCCTGCAAACACAATGTCAAGTTCG | | | | Rat | | |
| 2976 | cg12762301 | GTTTGCCATATCAGTTGCATTTGTCTTTGGTACAAAAAATAAAACAATCG | | | | Rat | | |
| 2977 | cg12827555 | ATCACCGGGGCCAGGAGCGATTAGGAATTCCAAAAAGCTGGCAGCTCCCG | | | | Rat | | |
| 2978 | cg12952128 | AGCTTGGCACGCAGACACCGGACGAGAGAGACTGCAGCAAGGGTTTCACG | | | | Rat | | |
| 2979 | cg13076512 | CTCTTTTTTCTCCTTTTCCCCCTGCCTGGAAAAATGGCTAGGTATCTACG | | | | Rat | | |
| 2980 | cg13165254 | GAGGTAACTGAGGACTCTGATGAAGACTTTATACAGCCCCGCAGAAAACG | | | | Rat | | |
| 2981 | cg14161220 | CGGCTGGGTTTGTATTTGCTGTTTTAATACAAACCCCGCCGCACTGCCTA | | | | Rat | | |
| 2982 | cg14305829 | CGGCCTTATTCTATTAGATAAGATGTGTTAATTACCCTGATGGCAATATG | | | | Rat | | |
| 2983 | cg14877464 | CGGAAGAGCGCTTCTCCAAATTGAAATATAGCAGAGTTTACACTCCTGAT | | | | Rat | | |
| 2984 | cg15085822 | ACATAATAATGACATATGCAGGAAATGCACCATTATTTATACATGTGACG | | | | Rat | | |
| 2985 | cg15178575 | TATGGTGTTTTGGTTGGCATGGTGACCCATTCTTCCTCATTAAACTAACG | | | | Rat | | |
| 2986 | cg15479466 | CGGGTAGAGTGTAAATTACATGTCGCCAGCATAAAATATTAAATCCAATT | | | | Rat | | |
| 2987 | cg15772525 | CGCGGGTATTTTAAAGGAAATGAGATCCGTGTGTTTCTGATTTATTTATA | | | | Rat | | |
| 2988 | cg15843929 | CCTAGTTATTTACACTCTTTTTCAAGCTTCGAAGCTGTTATAATCATTCG | | | | Rat | | |
| 2989 | cg16049333 | CGGGTACCCCAGGGAGTACAAACACCTTTTATGACTCACCAGGAACATTC | | | | Rat | | |
| 2990 | cg16117415 | CGGGGTCCTTAATGACCCTGGCAGGCCAATGATTTTGTTTTGTTTGAGAG | | | | Rat | | |
| 2991 | cg16264705 | CGGGCAAAATTACATTCCTGTAATGGCGTCGCTCGGGGTCCCGGGAAATT | | | | Rat | | |
| 2992 | cg16895007 | CGGGCTCTCGCTCCGCCGCTCCATGCTGCTCCGACTCGGAGACAAAGTTC | | | | Rat | | |
| 2993 | cg17174012 | CGGTGGAATCTGTTTTTCTGCCGCCATATGGTGTCGACAGAATGCCACTT | | | | Rat | | |
| 2994 | cg17399859 | CGGCCTCTACTGGTGTGTGTTTATAGAAAATGTTTCAATAGGCAGAAAAA | | | | Rat | | |
| 2995 | cg17514125 | CTGTAAGTGGTTCAACGTGCGCATGGGGTTCGGCTTCCTGTCCATGACCG | | | | Rat | | |
| 2996 | cg17835092 | CGCCAGCACAACAAGGACAAGCCCTACAAGTGTCCCAACTGCTACCGGGC | | | | Rat | | |
| 2997 | cg17952647 | CGGTTCTTTGGAGGCTCAGTTTTTGGTAATTAAGACTAAGGAGTGTTTAA | | | | Rat | | |
| 2998 | cg18184692 | CGCGGTAACCTTTGCAGATGGCGCCGCTATTGCTGAGAAATGGATTGCTT | | | | Rat | | |
| 2999 | cg18335591 | CTCAATCGGCTTGTTGTGATGCGTATCCCCGTAGATGCCAGCACGAGCCG | | | | Rat | | |
| 3000 | cg18479022 | CAAAGCAGCCTCATGCAAAGCACTGCCCATCTCCGTCTGGAAAGCAAACG | | | | Rat | | |
| 3001 | cg18506907 | CCATTACTGTCTCAAGAGCTATTCTGATTAAGGCTAACATGATGTGATCG | | | | Rat | | |
| 3002 | cg18576402 | CGGCCCCAACGATGGCTTCCTGGCCCAGCTCTGCCAGCTCAATGACAGAC | | | | Rat | | |
| 3003 | cg18594436 | AAATCCTTTCAGCTCTTCGCCAAACCCCTAGTGAAAGACAATCAGGCTCG | | | | Rat | | |
| 3004 | cg18800235 | CGGGCCAGCCTGCCTAAGGACAGGAGCCCCGAGGAGTATGGAATCACCGT | | | | Rat | | |
| 3005 | cg19148866 | GGGCTGACAGTGATTGGCAGTGGTTGCCGTGGCAACGCCACAACGACACG | | | | Rat | | |
| 3006 | cg19176697 | CGGATGTCACAGCTTTTCCATAGAACAATTGGAAGTGGAGCTAGTAAGTA | | | | Rat | | |
| 3007 | cg19424122 | CGGTGCCTGTGTCTGGGCTGTGTGAACCCCTTCACCATGCAGGAGGACCG | | | | Rat | | |
| 3008 | cg19426872 | GAAAACCCAGGGCACTGCGACTTTGTGAAGCTGAGGACAATGCTGGTACG | | | | Rat | | |
| 3009 | cg19499679 | TTGAAAAGCTTTGTGTTAACAGCCTTCAACCAGGCTCCAAGAAGAGTACG | | | | Rat | | |
| 3010 | cg20041510 | CGTGTCCAGGACAAAATCTTCCGGGCACATAAGGTGGTACTAGCAGCTTG | | | | Rat | | |
| 3011 | cg20095345 | TCCAAGAAATGCAGCTAAAATTGGCCCTCAAACAGCTTTTGCAGAGCACG | | | | Rat | | |
| 3012 | cg20116240 | TATTAAACTACATGCTTTGTCTTGTGCAGGTGTTGGCTTATGGAAAGACG | | | | Rat | | |
| 3013 | cg20153801 | CGGCAGGACTCGCCCATTGTGCCACCCAGATAATTATTCAACTATGCAGC | | | | Rat | | |
| 3014 | cg20870434 | GCTAGTTCTGGCCACATACTGTCAAATTTTCCAGAAGAAGCATGCTGCCG | | | | Rat | | |
| 3015 | cg20889526 | CGCAGCTGGCATTTACACACTCAGCATTACCATATGTATAGCTGCTCGGT | | | | Rat | | |
| 3016 | cg21388654 | CGCCAGTTTTACTACCTGGGCCTTCCCCAGACGTGTGCCTGTTAGTGGTG | | | | Rat | | |
| 3017 | cg21532698 | GCAGGTGATGTCATGCCCATTGTTTTGGTGCGCCCAACCAATCGGACTCG | | | | Rat | | |
| 3018 | cg21789423 | CGGCACCAGTAGTCAAAGGCCCCTCGCCACCCATCAAAAGTGACAAGCAC | | | | Rat | | |
| 3019 | cg22679201 | AGCTGACATTATGCTGTAGGATGTGCTGCAGGTGTGCAGGCCTGGGAACG | | | | Rat | | |
| 3020 | cg22998308 | GGATGCTCATTCCTTCTACAATTTCATCTACTTCATCCTCCTCATCATCG | | | | Rat | | |
| 3021 | cg23000776 | CGGAGGTTAAATGAACACGGTTGTTTATGAAGACACAGCCCGAATCCATT | | | | Rat | | |
| 3022 | cg23100467 | CGGCAGGAGGACAGTCGGGTGATGGTGTATTCTGCCCTGCGCATCCCACC | | | | Rat | | |
| 3023 | cg23345501 | ACGCCTATAATTTGTGTGAGTTGATCATACTTTGGTAAATCAGCAGGTCG | | | | Rat | | |
| 3024 | cg24066590 | CGAGAGACAAGAGAATAATTCTACGAGGCCGTGTAGAACAAGCAGAGAGA | | | | Rat | | |
| 3025 | cg24314463 | AGTTTGGCTTGTGCTTCTGCAATTTTTCGGTTATTCTCTTCCAGTATTCG | | | | Rat | | |
| 3026 | cg24380618 | CGCAGACCAAACTGGAGCATGCCCGCATTAAGGAGCTTGAACAGAGCCTG | | | | Rat | | |
| 3027 | cg24420398 | GACTCCGGGGAGTATTTCTGCCTGGCCTCCAACAAGATGGGCAGCATCCG | | | | Rat | | |
| 3028 | cg24558834 | TGACTAACTACCTCGCTCAATAGTAATTCATTTAGAGAATATTAAAATCG | | | | Rat | | |
| 3029 | cg24601458 | TGGCTTTAATTTTCCAAATCTGCAAATGCATCCGTTATGTCCCCGCATCG | | | | Rat | | |
| 3030 | cg24604427 | ACAGTCAGCGGAGAGCAAGTTTGCTTGTTTTCTTCCCTGTTAACAAATCG | | | | Rat | | |
| 3031 | cg24780501 | TGTGATGCGTGGGCTGTCGGGACATCTGTCTTCTATACCTAATAAAGTCG | | | | Rat | | |
| 3032 | cg24799293 | CGCGAAGATGGCTGCTGGCTGCCTGCTGGCCTTGACTCTGACACTTTTCC | | | | Rat | | |
| 3033 | cg24884825 | TCTTTTGGAAATTCTCTATTCTCTCACCTTATTAATGTTAAAACAAAACG | | | | Rat | | |
| 3034 | cg25420162 | CGAGCCACATGCGGTAGTGTGTAGCAATTAGTAGATAAAATGCTGACTAA | | | | Rat | | |
| 3035 | cg25473942 | GGTGCCATTTAGTGGCGGGCTCAATGGCGTACTCTCTGAAGGTCACTTCG | | | | Rat | | |
| 3036 | cg25560850 | CCATCTCCCACGGATTCTCCTAGATCCCATCAGATTGTCCCTGGAGGTCG | | | | Rat | | |
| 3037 | cg25799882 | TTCTAAATCAAATTCAAGGGTCACTGATTGTTAAGGCAACCATGGGTACG | | | | Rat | | |
| 3038 | cg25934764 | CGTCGCGCTGACATTGAAGTGTAATTTTTCATGGTTATTTGGACTGGAAA | | | | Rat | | |
| 3039 | cg26058975 | ATGGTGGGGCTGGACGGCACTACTGCAACAAAGCAAACACGGTCAGCACG | | | | Rat | | |
| 3040 | cg26077613 | CTAACTCTCCCTACGGCAGTAAGTGTCTGTTTTTGTCACACGTCATCACG | | | | Rat | | |
| 3041 | cg26352942 | CGTGCCGGCTTTCCTCAGCAAGCTGTGGACGCTTGTGGAGGAAACCCACA | | | | Rat | | |
| 3042 | cg27093665 | ACGTTCTTGTCATTCCTTATGTTACAGAACATCAATCATAAATAAAGACG | | | | Rat | | |
| 3043 | cg27344462 | CGGTAGCCGTCCTTCAGCAGCTGGATGTTCAAATCTTGGTTGATCTGCTG | | | | Rat | | |
| 3044 | cg09817427 | TAATTGAAATTTGTTGCCTTGATCTGTCAGCACTTCCAGGCAGGAGAGCG | | | | | | Universal |
| 3045 | cg22188876 | TGGGCATGGCACACACTGCTCCGTCTGGCCGTGGTAATACGTTCCCTGCG | | | | | | Universal |
| 3046 | cg23627331 | CGGATACATCTAGGGTTGGCATTTCAAGGAATATGTGTGGGTTTTTCGTC | | | | | | Universal |
| 3047 | cg07875786 | GTAGTGTCAAAGTTCACTATATACAGACATTCGCGCAGATCCCCCTTTCG | | | | | | Universal |
| 3048 | cg12492738 | CGTGTGTTATTTTATTTGTCTAGAGAGAGCCTATTTGTTCAGTGATGTGT | | | | | | Universal |
| 3049 | cg19604874 | CGTAGAGTGACGTTTTCTGTTGTGAGTCAGCCTCAGGACCCACATCAGGG | | | | | | Universal |
| 3050 | cg22380921 | CCGGGGGGGGGATTACCTTGTAGCAGGAGCCCGCAGACACTGTAGAAGCG | | | | | | Universal |
| 3051 | cg12933950 | CGCCTTTGATGAAATCCCAGCAGGCTTAAACAATAAAGCTGGTTACAAAC | | | | | | Universal |
| 3052 | cg26973693 | CTCTGAACCTTTAAAGTGATGTTGCTCCAATTACAGAGAGACATTGAGCG | | | | | | Universal |
| 3053 | cg11948733 | CATCCAAGTAGGCCTGAAACGTCTTGGGCTTTGAAATCCGCACCATGGCG | | | | | | Universal |
| 3054 | cg01090334 | CGAGAGGACCCGAGTGGTGTTATCTTAACTTTGAAAAAGCGACCTCAGAG | | | | | | Universal |
| 3055 | cg19981759 | AATTCATTTATCTGCAGGAATGATTGCTGCTATCAGTCTCGCGCTCACCG | | | | | | Universal |
| 3056 | cg13153497 | GGCCCTCTCTCCGGCTCACCTAATGACCAGGAGTTCGTGGAGCAGATACG | | | | | | Universal |
| 3057 | cg10930156 | CCCCCCTTGATTGCTGATTTTACGCTTTTTGGACCAATTGTGGGTCTCCG | | | | | | Universal |
| 3058 | cg12733826 | CCCTTCCAATTGGATCACGACCCTCTGTGTGCTCAGCTTAAGACCAGACG | | | | | | Universal |
| 3059 | cg05191959 | TGCCATGGGGACAAGGTGGGAGCCGGGGATGGCGCGCGCCTGGGCTCGCG | | | | | | Universal |
| 3060 | cg08938156 | TGTCTTTTGCGGTTTATCTTCCTGGGGAGAAACTTTCACCTCCTCAGCCG | | | | | | Universal |
| 3061 | cg20370622 | CGCTTCTAACGTGATAAATTCTTTCATTTGTGTAAGCAAATTTCGTTTGG | | | | | | Universal |
| 3062 | cg13702222 | CGGTTCCAAGCAGCAGAGACGTCAGGAAAGGCACTTCTTAGTACCAACCT | | | | | | Universal |
| 3063 | cg20635820 | CGGGACCAGCTGCTGGCCACATTTCCTGCTTTATTTTAAAAGGTAGTATA | | | | | | Universal |
| 3064 | cg00096922 | CGCGCAATTAAGGATTTAACCAAGGCTGTGCTGCGCCTCAGCCAGCAGTC | | | | | | Universal |
| 3065 | cg01352789 | CGCCAGTTCCAGGACTGGTGCCTCAGGACTTACGGGGACTCAGGCAAGAC | | | | | | Universal |
| 3066 | cg03909491 | GACAGGGTTCAAAGTTTTAATAATATTTGGATAATATCATTGCCCACACG | | | | | | Universal |
| 3067 | cg11742933 | CGCTGTGAGGCACCTGCCAAGAACATCGCCACCAGCCTGCATGAGATCTG | | | | | | Universal |
| 3068 | cg00114412 | CGGCCATTCTGACTCTGCGCCAGCAGCACTAGGCAATTGTGTTTTTAGGA | | | | | | Universal |
| 3069 | cg12564910 | GCGCCTCAAGACCTTCAGCTCCAAGAGCGAGTACCAGCTGGTGGTGAACG | | | | | | Universal |
| 3070 | cg16159306 | CGGTCCAGCTGAGCATCCCTTCCACTAGAGGGCCATGTGACACCTAAGGA | | | | | | Universal |
| 3071 | cg07172031 | CGAGACTTTTTACTTGGATTAATTACATGACACTCAGCAAAGAGCTTCTC | | | | | | Universal |
| 3072 | cg15571405 | CGCAAATACAGAAATCAAATTAGGAAAACAAGATATGTGGGTGTGAGGCA | | | | | | Universal |
| 3073 | cg24707133 | TACAGGTCATACCTGGTGGCATAGGCTGGCTTCACCTCGTGGGGGTTCCG | | | | | | Universal |
| 3074 | cg11488183 | CGAGGAGGAAAAGGACATCTGATTCATAGCAAGCCCTGCCAAAGTACAGC | | | | | | Universal |
| 3075 | cg11610869 | CGAGTAACCTCTTGTCATTTTGCCCTCCAGGACCTGAGCTAATTGGTGTA | | | | | | Universal |
| 3076 | cg18433728 | CAAAGTCGTCTGTGACAATCTGGCAACCTCTGAAACTCTTTGCTTATTCG | | | | | | Universal |
| 3077 | cg17829569 | TGACACACTGATTTAAACATTTATTCACTCCAACTACACAAATACACACG | | | | | | Universal |
| 3078 | cg08247363 | CGTGTGCCATGCTTGTTTGCCTACCAGTGCTGCTTAGATTGGCAAATGCC | | | | | | Universal |
| 3079 | cg14880272 | TGGTAGAGATGCCACACTCGCTCCGCGGTTCGCATGGCGCTCTGAAGACG | | | | | | Universal |
| 3080 | cg22903204 | CGGATTATTTGAATTTCATTATATCTATTGATTTGGGAGCATTTCATCTT | | | | | | Universal |
| 3081 | cg21907062 | AATTAAAGTTATCCTGGACAAAAACCTCATCTGTAATGACTAGCTAACCG | | | | | | Universal |
| 3082 | cg03663497 | CGGTTTTGAGTTAAACTGGGTGAAGTAGAAATATTTTACTCATCAGCTTT | | | | | | Universal |
| 3083 | cg20452275 | CGGCTTCCCCAGCTCTGGCACCCTATTCTGGGCACCACGCCCAGGGCTTG | | | | | | Universal |
| 3084 | cg10146459 | ATTCTTACTCCCTCGAGGAGAGCCACAGGTTGCAAATCCAACCAACCTCG | | | | | | Universal |
| 3085 | cg00296110 | GATTTATCTTGTAGTGGAATTAGTATTCCCCCAAAGGGCCCGGCGTGGCG | | | | | | Universal |
| 3086 | cg24653269 | CGGCCCCAGAGCCCCAGCCCGATCCCAAAAATAGCCCCAGCCTGCCCAAG | | | | | | Universal |
| 3087 | cg17718834 | CGGCGGCTTCATTTGCAAATGTGAACAGATTCTCAGAGCAGATAAATGAA | | | | | | Universal |
| 3088 | cg25943666 | GATGCCTAGGGGGTTTATACTGGAAGGACCAGAGCCGCAGCCTCTACCCG | | | | | | Universal |
| 3089 | cg06878766 | TGAATTTATATTAATTTTTCCCTTATTTTTCGGGTCTCTAATGTCTTCCG | | | | | | Universal |
| 3090 | cg14517144 | ACCTTTGTTCATTAGATACACATACCACCATCATATCCATCACCTCCTCG | | | | | | Universal |
| 3091 | cg11677981 | CGTGTTCTGCAGTTTAACTACTTCCAAATTCTTTGTTCAGGTCACCCCGG | | | | | | Universal |
| 3092 | cg19109204 | TGCCAGCCCCCTCGTCTGATTACATCTAGTAATTCTCCACTGAATGAACG | | | | | | Universal |
| 3093 | cg26294431 | CTCATTTGGACCAAAACAAACTCCTCCAAACTGCTACTGACTGCTAACCG | | | | | | Universal |
| 3094 | cg11666770 | CGCGCCGCTTGTCTCTTAATCTCCAGAGCGACCGATCGATTCGCTATTTC | | | | | | Universal |
| 3095 | cg00250826 | CGGCTTAATCTCCTGGGATGAGTACAGAAACGTGACTTATGGCACTTACC | | | | | | Universal |
| 3096 | cg06721379 | CTTTGAGGAGATCCAGTTTTTTAATGGCCACAACTATCACAAAGGCATCG | | | | | | Universal |
| 3097 | cg10893516 | GGAGCGCCTGCGAGCTGGATCTGGTGGAGGATGCTGCGGCAGGTGCTTCG | | | | | | Universal |
| 3098 | cg26014931 | CGCCTGCGGCCACCGCCATGTACCTGCCTACTTAGCCCAAGGGTTAATTA | | | | | | Universal |
| 3099 | cg12722365 | TGAATGCCCAAGCTGAATAGCCATTTGAATGAAGGCTTTAGTTTGATTCG | | | | | | Universal |
| 3100 | cg12156848 | GGCAGGCATGGTACAGAGCGCTTCCTTGCACAGCCTTGCCCATGAGCTCG | | | | | | Universal |
| 3101 | cg08538268 | CGGCAACTCCAAACTAACATGGCAGTCAGACTGTGTGATGTGGCTTCTCT | | | | | | Universal |
| 3102 | cg03127034 | CGGAAATTGGGGTCATTCTCATTTGCAAAGCGGAGGATCGGAGCCCCGTA | | | | | | Universal |
| 3103 | cg01550545 | ATCATTGTTGAAATATTCCCTTTGAACTGCCGTGTCCAGGGGGGTCTCCG | | | | | | Universal |
| 3104 | cg00467357 | TAATTGTTCTCCCTGGGAAAAACAGAATGGCATGCATTTTCCACAATACG | | | | | | Universal |
| 3105 | cg01450059 | CGTGGGAATTTAGCTAAAACTGTTAAAACTGACACCATTGGCTTTTGTTA | | | | | | Universal |
| 3106 | cg15746205 | CGTGGAAACTTTTTAACATGCTTTGTCGCATTTATATGCTACAGGTTACA | | | | | | Universal |
| 3107 | cg18368305 | GAATGGTTCCTTCTCATCCAACTGCCCATGCGCCAATGATGCTAATGACG | | | | | | Universal |
| 3108 | cg06607996 | CGGGGGCTGGGCTAACAATGCACCATCAGGCCCTTTGTGTGCCTGCACTT | | | | | | Universal |
| 3109 | cg01429475 | AACACGATTTAAAGGCACGATGACACTGATTACTGACCCTCTGCCATACG | | | | | | Universal |
| 3110 | cg12880090 | TTCCAAAGCCAAAAATTTGGACATTGACCCCAAACTGCAAGAATACCTCG | | | | | | Universal |
| 3111 | cg10916192 | CGCCAGCCCGCGGGTGGCTCTCTGCAGGTGTCAATTTATTCCAGAGATGA | | | | | | Universal |
| 3112 | cg09364634 | AGATGACACTAGGACATTGACATAAATGGAGCCATAAAAAGACTCACACG | | | | | | Universal |
| 3113 | cg09169719 | ATAGCACCATCACCTTATTAGGTCACAGCAGAGTGAGTGTCCCAATGTCG | | | | | | Universal |
| 3114 | cg09984378 | ATCTTTTAATAAACAGTTTACTTTTATTTAACTTGTTGTGCAAAATCACG | | | | | | Universal |
| 3115 | cg10439738 | CGGATGAGCTGTCTCAAGGCCATATTCCAGGGGAACGATAAGAGCTGTAA | | | | | | Universal |
| 3116 | cg11235379 | CCAATCACTGGAGGTTTCAAGGAGGCAAATGGGTTCCTTGCGGCAAAGCG | | | | | | Universal |
| 3117 | cg26081366 | TTGCCCCCCTACTGGGGTTATTTGTCCTTGGGTTGAAGGGTTGGAAATCG | | | | | | Universal |
| 3118 | cg23646867 | TACCAATTTTAATTTGCCTCTAATTAAATCCTGTGTATTTTTCCGACTCG | | | | | | Universal |
| 3119 | cg20945212 | CGCTAGTAATTCTCCCGTGTGGTTGAATTCTACCGTAGAGATAATGTCAG | | | | | | Universal |
| 3120 | cg00384342 | AATAGCACAGAAGTCAGAGGCAAGTTTGAAAGTACACCAGAAATAAAACG | | | | | | Universal |
| 3121 | cg02360445 | CGCACTGGTCTCTTAAAGAGTGCCTAATTTATAGTAAATAGCAAGGTCTT | | | | | | Universal |
| 3122 | cg15547854 | CACGTAGCCCAAGCGGCCGATGGTGATGGCTGGAATGGCAGAGGGACTCG | | | | | | Universal |
| 3123 | cg05844902 | CTCATCCTTACCATTTTGACAATCTGGTTATTTAAAAATCATCGATTCCG | | | | | | Universal |
| 3124 | cg16853731 | TTTTTATTTATTCGTGGAGCCTCTCGGCTCCTGGGGTCCTTCTAACTCCG | | | | | | Universal |
| 3125 | cg21351544 | CGAATGGCCCAAGGAAGCCACCAAATTGATTTTCAGGTTTTACATGACCT | | | | | | Universal |
| 3126 | cg23754860 | GAAAGGCCATGGTGCCAGTTGCGCAATTTGGCAAAACGTGGGCTGTTACG | | | | | | Universal |
| 3127 | cg22122198 | CGAGTGGTAATAAGGACAATAGGGGCCCTGGCTAATTTGACATGGACAGC | | | | | | Universal |
| 3128 | cg05537515 | AGGTATGGCTGCTATGGGGCCAGTTTCCTCCTCTTGTTTTTGGCAGGACG | | | | | | Universal |
| 3129 | cg23778391 | CGGGACCCCTGGCATCGGTATTTATGGGAAAAAAATGGGAAATGTGCTGT | | | | | | Universal |
| 3130 | cg01648457 | CGTTATGTACCTTCAGGTGTTAGAGTGTGAGCGTAACCAACACCTGGTCC | | | | | | Universal |
| 3131 | cg20422755 | CGGGGGTGAAATGCAGCGGCCATTCTGACTCTGCGCCAGCAGCACTAGGC | | | | | | Universal |
| 3132 | cg17856858 | CGCAGAGAGCCAGGTTGCCAATGAAAAAGTACATGCGGTTGTGAAATTTA | | | | | | Universal |
| 3133 | cg17267107 | ATAAAGTTCTCCCTGCGCGTCCCTTCTAAACATTTCACTCAGTGGAAACG | | | | | | Universal |
| 3134 | cg12815291 | CGACCCTTTCTGTAAACATTTTACAGCTCTCCGCGCGTTTGAGTGACGAT | | | | | | Universal |
| 3135 | cg11025714 | GCAGCAGCTGGTTGCTGTTACTCAGGACCTGGGCAGAGAGAGCAGCCTCG | | | | | | Universal |
| 3136 | cg23053149 | CGGGCCACTGTTGCTAACCACCATCCTGGTGCAGGTCCTTCACATCTGCT | | | | | | Universal |
| 3137 | cg02172466 | CGCCTGGAAGCAGCTGGCTTCCACCATACCCCAGATGCCTCAGATCCCAG | | | | | | Universal |
| 3138 | cg20076842 | CTCAACATCCATCTCCATCTTCCCATTCACTGGAGGGCAAGACAAAAGCG | | | | | | Universal |
| 3139 | cg15298634 | TTGATGGCATCTTTGCTCCAGGTGACACCTGCATGCTGGCCAGCTGAGCG | | | | | | Universal |
| 3140 | cg18188156 | GACTCAATTGACACCTCAGTGAACCACAAATTAGCGTCTACAGCTGCTCG | | | | | | Universal |
| 3141 | cg21608448 | CGGCATGTAAGAACACTTGGATTTTGAGTAGCACGCCCACATTTACACCC | | | | | | Universal |
| 3142 | cg25140691 | CGGAAGCTTTAATTCTATTGAAATGGCAGCTGCTCAGCTCCGGGGCACAG | | | | | | Universal |
| 3143 | cg11700079 | AAGTCCCTCAAAATGACGGACGCGCAGGTCAAGACCTGGTTCCAAAACCG | | | | | | Universal |
| 3144 | cg13182287 | TTCTTCTATCAACCCTGCTTAGGATGAGAACAAGTTGAGCAGTGCCAACG | | | | | | Universal |
| 3145 | cg05111574 | CGACACAATGGTTAGTAGTTATCTTCCATTTGATCCGTAATCTTTATTGG | | | | | | Universal |
| 3146 | cg15701287 | ACAATAGTCTAATTTACATGACATTCTCCATGAAGCTATTTTCACTGACG | | | | | | Universal |
| 3147 | cg11642756 | TAGACGTGAACTTGTCGATTGGGCAAATTGTTTTTGGTCTCCAACTGCCG | | | | | | Universal |
| 3148 | cg23337318 | CGTGGCAGCCTGCAGCACTGTGTATGGTTTAAATTAAACCTTTTTTTGGA | | | | | | Universal |
| 3149 | cg15296094 | AAGTCCCAGAGTCCTCCAAGGTGAGCCGGGTTATTCTCAGCACACTCACG | | | | | | Universal |
| 3150 | cg15855274 | ACTTGGTAATAGACCTTTTTATGACCTATTTGCGGTCGTCATTGGCTGCG | | | | | | Universal |
| 3151 | cg20565386 | CGGGAATTAGACGGGCGAGTTCCAAATTCTTACTGACTTTGGCAGCTCCT | | | | | | Universal |
| 3152 | cg13057591 | GCCCACCATGTACGCCTTTGTGCGGTTCCTGGAGGACAACGTCTGCTACG | | | | | | Universal |
| 3153 | cg14360110 | TTTATTCCGAGGCAGGAGCCCCGGCGTGATTAGGCCCTTTGTAATTATCG | | | | | | Universal |
| 3154 | cg21086539 | CGCGGGCTCTCCAGAGCCCCAGCTATGTTTCCCATTATGTAACCCTGGTC | | | | | | Universal |
| 3155 | cg10945667 | CGGAAGTACTTTGTTTTTTATGCTAATGAGGGAGTGGGGCTTGTCCGTAT | | | | | | Universal |
| 3156 | cg00020468 | CGCAGTGGTGCAATTGACATGAGCAAGAGGGATTTTGTTGAAGAGAGGCT | | | | | | Universal |
| 3157 | cg00098422 | CAAATCCCAAGCCATTAAAATACGACTAATTTTAAGTTAAACAGAAGTCG | | | | | | Universal |
| 3158 | cg00106940 | CGGCCCCGGCGGAAAACCAAGACGCTCATGAAGAAGGATAAGTACACGCT | | | | | | Universal |
| 3159 | cg00314427 | CCCCAACCTGACGGCTTCTCTCTTTACACACAGTGAAGTTCAAGTCCTCG | | | | | | Universal |
| 3160 | cg00362836 | AAAAGTCAGTTTATACCATCCTTTAAAGTGAATCAAAGAATGCATAAACG | | | | | | Universal |
| 3161 | cg00454305 | CGGGGCAGCTCTGGGGCTTTCTGCCTGAAGACCTCTGGCCCCCGCTGCCC | | | | | | Universal |
| 3162 | cg00568797 | TTTACAAACTGTCAATAAGGCAAGAAAAGCCCTGCCAGGAAACACAAACG | | | | | | Universal |
| 3163 | cg00643485 | CGGTCTGTTCCTCAAAAAGGGCAGTCTTTTCAGTGCAACCACTTTAATGT | | | | | | Universal |
| 3164 | cg00689383 | CGGGTCTTGAAGGCATAGTAGGTACAGCTCATGATGAGGAGTCCATTGTA | | | | | | Universal |
| 3165 | cg00788877 | CGGAAATTGAAGCAATCACTAAAAGGTGTCGGGGAATTAAAATGTCCTGT | | | | | | Universal |
| 3166 | cg00864083 | CGGGAAGTGCCTCTCCAACTCTGGCAATCAACACTGTGACTAACAAAGTA | | | | | | Universal |
| 3167 | cg00871371 | CTAACAGAAAGTGTCGGGCCCCCAGTGGGATTTCTGGGGAAGAACTCTCG | | | | | | Universal |
| 3168 | cg00984060 | CGGTGGGCCCAGGGCTTCCCCTTGGAGTGAGCCTGGAGCCTTCTGTGACG | | | | | | Universal |
| 3169 | cg01137681 | CGGCTTGGAAAATCCCACCGCCAAAATTGAGCCCAGCAGCTGGAGCGGCA | | | | | | Universal |
| 3170 | cg01150494 | CGGAAAGAGGACCCTGCTTTACCCACACAGGTTCCTCTGCAGTACAATGA | | | | | | Universal |
| 3171 | cg01169686 | CGGTGCTTTTGACTGACAAGCATATTGTTATGATTATGACTGGACTTCTT | | | | | | Universal |
| 3172 | cg01224972 | CGTGTCTTTATAAACAGCTTATCTCCTTGAGAACAAAGAATAAACAAGGA | | | | | | Universal |
| 3173 | cg01293647 | CGCATGCCAATCACCGTCTCTCATGTGATAGCTGCTGCCCGTGACGTGCC | | | | | | Universal |
| 3174 | cg01301326 | CGGGCTGTTAACAGGCAGTTGCAATCAGTTTCCGAAAGGTCAGCCAAGGT | | | | | | Universal |
| 3175 | cg01309159 | CGGTCAGTGGAAACAGGACATTTGGATGGAGTATTTATGCATAAGCGAGC | | | | | | Universal |
| 3176 | cg01328716 | GGAAATTTTCCCCAAAGACACAGCCAGTCTTGGTGCAATTAGTGACAACG | | | | | | Universal |
| 3177 | cg01337143 | TTGAGCCGGGCCTTCATGAATGTGGTCCATGTGTCCTCCAGCAGGAATCG | | | | | | Universal |
| 3178 | cg01534197 | CGACACAGTTCAATGCAAAATCAGATATAAATCTAGCTTAAGAGACTCTC | | | | | | Universal |
| 3179 | cg01585174 | CGTGCTTTTATAAGTATTTGAAAAGAAAATATTTTAAAGATTTGAAATAG | | | | | | Universal |
| 3180 | cg01631669 | GAACACTAATGAAGCTGGCAAAACAACTTTTCTTTTTTTATGGCTGAGCG | | | | | | Universal |
| 3181 | cg01648756 | CCTCTGTTTGCCATAAAGATCTCCAGGGCTGTATTTTGCAAAAGATAACG | | | | | | Universal |
| 3182 | cg01782227 | GTTGCTTTAGCGCTTACGCCCCGCCTCTGGTGGCTGCCTAAAACCTGGCG | | | | | | Universal |
| 3183 | cg01946200 | GATGAGGGTCCCAGCGGATCGGAAATGTGAAGGGTCAGCGCTGCCGCCCG | | | | | | Universal |
| 3184 | cg01998606 | TGGCTTGTGTGTCACCATATGCCGCTCGAGCTGGGTGCGGTAGGCAAACG | | | | | | Universal |
| 3185 | cg02040823 | CGTGCTTCAATCAGCTGGCTGTGTAAGAATTCAATCAGCGTTAATCTAAC | | | | | | Universal |
| 3186 | cg02177464 | CGAGTGCCTTCCCAATGGTCAGCCACCCAGTCTTTGGTCTACATTCAGCC | | | | | | Universal |
| 3187 | cg02184281 | CTGTTGAAGATGACCTCTAGCCAGCACGGGCAGCTGCTGATGAACTGGCG | | | | | | Universal |
| 3188 | cg02273345 | CGAATTGTGATCTGATTACCTGAACTCAGTGGAAGTGATTCTCCTACTCA | | | | | | Universal |
| 3189 | cg02284095 | GCAACATCTGGCAAAACCTTTTCAGCAAATTCTTCCTGGCCGTCAGTCCG | | | | | | Universal |
| 3190 | cg02287493 | CGGTGAGCAAATGGTCTCCGAGTCAAGTAGTGGACTGGATGAAAGGTAAT | | | | | | Universal |
| 3191 | cg02551294 | AAGTTATAATTGATATCGGGGCCCATCACCATAATGGGTTCATCATAGCG | | | | | | Universal |
| 3192 | cg02629039 | CGAGACTGGCAGCATCCGGCCTGGAGTGATAGGGGGCTCCAAGCCCAAGG | | | | | | Universal |
| 3193 | cg02864622 | AGAAAACATATAATGTCCTGTTGAACACAGGCCAAATACATTCCCAGACG | | | | | | Universal |
| 3194 | cg02946452 | CGCTTCTGCACTCACAGTGGTACCACCCTGGCAGGTTAACGCAGCGGGAA | | | | | | Universal |
| 3195 | cg02953590 | TGCGAGAACAGGTACCAGCAGGCTCAGGTGGAGCAGCTGGAGCTGGAGCG | | | | | | Universal |
| 3196 | cg02963786 | CTGTGTGCATTTCATTTCTGTCAAGAGTATGTACAGTTAGGGTTCATTCG | | | | | | Universal |
| 3197 | cg02968236 | AAAGAGCTTTTGGTGAGTGCTCATTCCAGGATAATAAACCAAGCAAAACG | | | | | | Universal |
| 3198 | cg03163184 | CGCCAGGTCCCTAGTTAGCAGCTTCCTTCAGCTCATCCAAGAAGCTGACA | | | | | | Universal |
| 3199 | cg03225697 | CGAAGCTGTAAATCAGGATGTTACATATAAATAGTTTCCCTATAAAAACG | | | | | | Universal |
| 3200 | cg03247467 | ACCACAGCTTGAAGGCTCAAAGCTGTGAAAGATAAATTAACCTTCCCTCG | | | | | | Universal |
| 3201 | cg03320248 | CGGCTTAAAATTAGAGTTGTGAAGGCATTGAAAAACACCAGACTTCCCAG | | | | | | Universal |
| 3202 | cg03387624 | CGGGCAGGGTGACGTCACCGTCTCCCTGACACTCCACATTAAAGGGCTGG | | | | | | Universal |
| 3203 | cg03420509 | CGCTTGTCTTCTCAGCATGGATGTTTAATCTTCCTAGGCTTTGTGAATTG | | | | | | Universal |
| 3204 | cg03600207 | CGCCAGGGAAAGCCCTTCAAAGCCAAATACAAACTTGTAAATCACATCCG | | | | | | Universal |
| 3205 | cg03668418 | CGGCTGTTAATGACTTTGATGTTGATGTGGAAAAGTGAATGACTGCATAA | | | | | | Universal |
| 3206 | cg03683773 | ATTGCTTACCCAGTACATATTAAATCTCGGCAAGTATGATCAAAACTACG | | | | | | Universal |
| 3207 | cg03820088 | CTTTCTACTTCTCTTCATTCTTCATTGAGTTTTTCATTTTTCATACTTCG | | | | | | Universal |
| 3208 | cg03905052 | GTGAGACTGTAAGGTCGAATAAGCTGCCTCAAAACCTGCAAAGGGTAACG | | | | | | Universal |
| 3209 | cg03917360 | AGTCTGTTATTGGCTTTATAATTACATAATTAACTTTTTGTCTCTAATCG | | | | | | Universal |
| 3210 | cg04025518 | ATGTTCAGTTCCAAGGAGTCCCAGGGGGGCATGGGCTACATGCCCAAACG | | | | | | Universal |
| 3211 | cg04103301 | CGCCTGCGCCACCAGAACCCAAGTGCAAACCACCATGTTCAGTTCTGCCA | | | | | | Universal |
| 3212 | cg04111974 | CATGTCCCACTCTGCCATCTAAACACAGGCTTTTTGTTTCTTAAGTGACG | | | | | | Universal |
| 3213 | cg04366185 | TTGGGCAGTTCTGGACAAGTCATGGACTCAGTTTCTCTACCTGGGAAGCG | | | | | | Universal |
| 3214 | cg04368876 | AATTATGCAAATCCTGCTTTCTGGTGTCCATTCAGCGGCAATTTCATGCG | | | | | | Universal |
| 3215 | cg04373810 | CGTGAGGATCAAGGGCTCAATTGGTTGTCGTGAGAACAAAAATGGTGACA | | | | | | Universal |
| 3216 | cg04539386 | GGCTCGGGGCATTTGCTGGATGTCCCAGATGAGAGCCTGGTGGTCATCCG | | | | | | Universal |
| 3217 | cg04584281 | CGCCATAGGCCATATTAAGCAAATTGTCCAGCCTGCAAAGAGAAGGAGGG | | | | | | Universal |
| 3218 | cg04706544 | AGAGACCGCCCTTCTCTCTGCCTGGGTGAAAATTAAACTCTAAAGTACCG | | | | | | Universal |
| 3219 | cg04707251 | GGTTTAGTGTAGTCCCAACTGTCATTGTCATTCCTAATAACATTTAGACG | | | | | | Universal |
| 3220 | cg04725401 | CGAGGTATGCTTTTGTTTGAAACTATCTGAAAGACAGAAAGAAAAGTCAT | | | | | | Universal |
| 3221 | cg04787747 | TGGCTTTAGCATGCTTCTTATTAGGGCTGGCAAAGCTGGGCTGGTAAGCG | | | | | | Universal |
| 3222 | cg04817453 | CGGAAATGACGTCAGCAAAGTGAAGGACCTGTTTACTGCAGATCAAAACA | | | | | | Universal |
| 3223 | cg04847707 | CGTCGGACCATTCAGTTGTATGAAATGTACTTCAAAGATCCCCAGGTAAA | | | | | | Universal |
| 3224 | cg04889095 | TCACTGGCAGTGGACACCACGGAGAGCAGGGACATACGCCGGGTGAGCCG | | | | | | Universal |
| 3225 | cg04913399 | CGTCAGCAATACGCCAAGAGCAAAAAACAGGGTAACTCGTCCAACAGCCG | | | | | | Universal |
| 3226 | cg04996684 | CGCTTCCCAACTGGCAGAAGCATCCCTCAGGGGACAAGTCTTTAAACCTC | | | | | | Universal |
| 3227 | cg05035366 | CGCGTGTGCCACCCCCGCTGCATTGAGCACGGGACCTGTAAAGATGGCAA | | | | | | Universal |
| 3228 | cg05136138 | CGCCATGTCCATGTAAGGGCGGCACGGAGTGATCTAGCTGCATTAGAGCT | | | | | | Universal |
| 3229 | cg05172686 | CGCCTTCATCATCAGTGTCATGCTCATTGCGGCCAACCAGGTGCTGCGCA | | | | | | Universal |
| 3230 | cg05196683 | AGGGTTTTCATTCAGATGAAGATGTGGCCCCCAGTTCCCTGCGCTCTGCG | | | | | | Universal |
| 3231 | cg05243338 | GCTAATGTGCTCTGGTTCATCTCTTTGAGCAGTTCCTTTAAGGCATTGCG | | | | | | Universal |
| 3232 | cg05261703 | CGTCATGCTGCATATAAACATTTCAAGAAAGTCACAATGTATAAGAATGG | | | | | | Universal |
| 3233 | cg05292023 | CGGTGCCTGCAGCTGATTTGATGGGTTGGAAATGCGCACGAAACAAAATA | | | | | | Universal |
| 3234 | cg05330587 | CGGGGAGCCCACCGACTTTATTAACCTGCACAATGCGCGGGCGCTCAAGT | | | | | | Universal |
| 3235 | cg05332360 | CGTGCTTCCTTGCTTTTGACAAGATTTGCTGCAGTCTCATGCGACAAAAA | | | | | | Universal |
| 3236 | cg05359706 | AGTGGTGCCTTTGAATACTTTAACATTCCATTATCCAGGACAAAAAAACG | | | | | | Universal |
| 3237 | cg05401971 | CGGGAGGTCTGGATGTCTGTCTTCCGCTACCTCAGCCGCAGAGAACTTTG | | | | | | Universal |
| 3238 | cg05456580 | CGGCACCAGCATGATTTTGATGAAAATGGAATCATTTACTGGATTGGAAC | | | | | | Universal |
| 3239 | cg05524242 | CGCTTCAGGGCACTGGCAAAATGAAAGCGCTGGTGAATTTTCAGCCCCTG | | | | | | Universal |
| 3240 | cg05551621 | CGCAGATGCCGCTCAGGGTCAGCTTCTTCTGCGGGCTCTGCAGGATGGCC | | | | | | Universal |
| 3241 | cg05584618 | TGAAATGTTTCCACAGTTTATTTTTCTAGGATCTTTTCCATGACTGCTCG | | | | | | Universal |
| 3242 | cg05620664 | CGACCTGGGTCTTGAGAAACTTGAGTTAGTAGATGTTAGTTTTTCTTAGC | | | | | | Universal |
| 3243 | cg05684493 | AGGAGCATACAGCAAACATCAGTTTACAGCATAGCTAGATTTGAAAGACG | | | | | | Universal |
| 3244 | cg05690769 | TGAAGATTTTATAGAAACGACATGAAAACTACATTTACTGACATTCATCG | | | | | | Universal |
| 3245 | cg05704605 | CGGGTCGTGTGGAACTCATCAAGTAAGTTTCAAACGTCCTCCCAAAAGTG | | | | | | Universal |
| 3246 | cg05793328 | CGCTGGGGAACCTTCACACTGTTGGGGAAGATTTTTATAGTCAGTGGGTT | | | | | | Universal |
| 3247 | cg05801021 | CGTGGGCCATTTGTAAGGCCCAATAGACCTATCCAAGTTACTCGCTGTAG | | | | | | Universal |
| 3248 | cg05801832 | CGTGATCGCCAAGTTTCTCTCTGGGAAAGGATCTGGGATAGATTATACCT | | | | | | Universal |
| 3249 | cg05817746 | ACAGAGTGACAGCAATGTGACACCATGGAAATAATTACTAACAAATCACG | | | | | | Universal |
| 3250 | cg05844937 | GGATTGCTGCAAATAAATACACTTTAATTTCAGTCAAAAACTGCTCTACG | | | | | | Universal |
| 3251 | cg05911522 | GGGTTGTAGAAGTTATCAAGTGGGATTTGCGGCGCTCTCTGCAGGAAACG | | | | | | Universal |
| 3252 | cg06004718 | CGCACCAGCATAGAGACCAACATCCGTGTGGCCTTAGAGAAGAGTTTCTT | | | | | | Universal |
| 3253 | cg06102298 | CGCCGCAGCCCAAAGCCCTGCCATTGTGGCAGCTGTTCAGGGCAACCTCC | | | | | | Universal |
| 3254 | cg06333141 | CGTGGTGTAATTGTTGAATCAGCGTATTCTGATATAGTAAAAATGGTAAG | | | | | | Universal |
| 3255 | cg06386724 | GCAGGACCAGGAGCACCAGGTGGAGCTGGAGCTGCTGCGGGACGACAACG | | | | | | Universal |
| 3256 | cg06391468 | TTCTCCTGCTCGTCGGTCATCTTCATGAAGGGGTCCAGGAGATTCATACG | | | | | | Universal |
| 3257 | cg06472065 | CGCTTAAAAGGTTTCCATGGGAACAGTGAGGGGAGATGAAGGCAGAGAAC | | | | | | Universal |
| 3258 | cg06482098 | GACACGACGATGTTGATGGGCGAGCTGGTGCTGTAGGACTTGGCCAGGCG | | | | | | Universal |
| 3259 | cg06679868 | CGATGCCATATACGTTGTAACCTTCCTTATAAGTTGCAAAATTCTGTGAA | | | | | | Universal |
| 3260 | cg06721611 | CTTTCTCATTTAGTTAATTACCGAGTGAGGATCATCATTTCCCCGGATCG | | | | | | Universal |
| 3261 | cg06736685 | TTCTGGTTCTGAACGTGAAACCCTGTTGGAAACAGGTCTCTTGACCCTCG | | | | | | Universal |
| 3262 | cg06787049 | CTTCTGATTAAATATGAATTACTATGAAATTTTTCTCATCATCTAACACG | | | | | | Universal |
| 3263 | cg06790494 | CGGGCGGATTACCGTACATGAGGTACTTGGACAAAGTTTTACGGGGAAGA | | | | | | Universal |
| 3264 | cg06828322 | CGGGTTAAATTTATTGCCAAGCCCTGGCTGGCTGCAAATTCGAATTGCCA | | | | | | Universal |
| 3265 | cg07014363 | GAAATAGACTTTTCCCTCATCCATCATAAGTCAGCGTGACAGGGCTGTCG | | | | | | Universal |
| 3266 | cg07081182 | ATTAATGTGTCAAGCCAAACTAATGCATTTTTTATGGTGTCCATGCTTCG | | | | | | Universal |
| 3267 | cg07225115 | TTTGTGTTTTCCTTACTAGAAAATAATTAGACCTAATGAATATGCAGACG | | | | | | Universal |
| 3268 | cg07293320 | CGGGCCGCTGGGCTCCTGCAGAGTTTTGATATGAAAGTAATTATTTTCCG | | | | | | Universal |
| 3269 | cg07299823 | CGGACAGGAAGCCTTTGGCCGCCTATTAAATCCCACCCATTTCTCCGGGG | | | | | | Universal |
| 3270 | cg07383477 | CGAGTCTCCATAGGATGTCAACAATAAAGGGGTTAATGAAGCATCCGATC | | | | | | Universal |
| 3271 | cg07423797 | CGTGTGCAGTCCTTCTGGTTTTGGGCAAGGTCAAAGCCGGGCCTGCAGTC | | | | | | Universal |
| 3272 | cg07459759 | CGTCTGTTAAACGCTTTGAAGATTGGAAGCAACAGATAAGTACTGGATGA | | | | | | Universal |
| 3273 | cg07601141 | CGGTGACGGGTATTCTTGGGTGGATAATACGGATTACGTTGTTATTGCTT | | | | | | Universal |
| 3274 | cg07776022 | TAGACATTACCTAACTCTTGATTTGTCACACCGGGATCAATAACATTTCG | | | | | | Universal |
| 3275 | cg07843244 | TTTGTTGATTTATTGTACGTTAGCCACCGAGCCGTGCAAAGAACATTACG | | | | | | Universal |
| 3276 | cg07878283 | CAGATAATTCAGAAACTATCTGTATGAGCTGTTTATCAAATTATTAACCG | | | | | | Universal |
| 3277 | cg07881279 | GCATCTCTTATTTCTTTAAATACATTAATCAGCCTAGTGTAGGCAAAACG | | | | | | Universal |
| 3278 | cg07906193 | GGCCTGATTATGGACTGCCAAGACTTTTTGGAGAAAGCAGTTTCTTGTCG | | | | | | Universal |
| 3279 | cg07932605 | AACAGTTTGATTAAATGAGCCATCATAACAATGATGTCTGCGGGAAATCG | | | | | | Universal |
| 3280 | cg07991826 | TGGTAGATGAGGTGGCCCTCAGCGTCGTCCTCTACACTCTTGGCTCTCCG | | | | | | Universal |
| 3281 | cg08030321 | GTGCGAATTTTCCTACGGCAACCACAACAATTGCAGTTTCCAGATTGTCG | | | | | | Universal |
| 3282 | cg08092317 | CGCTTTGGGCATTTTTGTATTTCAAATTTGCAAGTTGTCAGTTTGAAAAA | | | | | | Universal |
| 3283 | cg08321639 | CGTCAGTTTCAAGACACCAACACTATTAATATCAAAGGAGCCTTCGCGGA | | | | | | Universal |
| 3284 | cg08378313 | CTAGTCTTGGGTTACTCATAAACATTCAGCAAAGCAATTTCACTCAATCG | | | | | | Universal |
| 3285 | cg08438614 | CGGCCAAACATGGAACCATTTTCTGTGGCGAATCGCTGAGTTCTACCTGG | | | | | | Universal |
| 3286 | cg08446005 | CGCCCCCTGGACACCAGCCTGCGCCTCAAGACCTTCAGCTCCAAGAGCGA | | | | | | Universal |
| 3287 | cg08454381 | CGGCCTGGAGTGATAGGGGGCTCCAAGCCCAAGGTGGCCACCCCCAAGGT | | | | | | Universal |
| 3288 | cg08508546 | CGGCAGTTTAACCTCCGTGTCTGTCAGCTGTGACCTTTTACCAACCCCAA | | | | | | Universal |
| 3289 | cg08570512 | CGCCTGCTTGCACCAGGAACAGCTGATAGCCACAATCTCTTTACTGTGGA | | | | | | Universal |
| 3290 | cg08627730 | CGCTTGAAGCATATCTATCTGATTAGTGGAGAGAGTGCTCTTCTCTGTCA | | | | | | Universal |
| 3291 | cg08651129 | GGACAGACGATCATCATGCAAATCAAGGTCATCACTTGTAGCACCATCCG | | | | | | Universal |
| 3292 | cg08676748 | CGATTTTACAATTTAATGCAGCAGCTTCCCGCCCGCCTGGGACAGATGCC | | | | | | Universal |
| 3293 | cg08681110 | CGCCCGCGAGCCCATTCATCTGTGCACTTGGGCGTTGGACCCCGCATCTT | | | | | | Universal |
| 3294 | cg08747377 | GGCTCCCACGGAAAATATGCTCAGTGCAGCCGCGTGCATGAATGAAAACG | | | | | | Universal |
| 3295 | cg08909367 | CGTAATGGCCTGATTTAATCACAAAGGCAGAATTAAATTCAGATGGCAAC | | | | | | Universal |
| 3296 | cg08933909 | AACGAGGGGGCTCTAAAGCCTCGATGCTCTACAGGAAGCAAAATCTGTCG | | | | | | Universal |
| 3297 | cg09008979 | AGTGGTTTGGGGTTTGTTCCTTTTCCCTCCTGTTCCTTCCCTCAGCAGCG | | | | | | Universal |
| 3298 | cg09009312 | CCATTAGCACTTTTGACAGATCCAAAGATAACTCTGAAGCCACCAAAACG | | | | | | Universal |
| 3299 | cg09023627 | CGGGGATTGGATGATACAGTTTCCATAGCATCTCGTAGTAGAGAGGTTTC | | | | | | Universal |
| 3300 | cg09061197 | CGCAAAGCCTGCTTAGATTGTATATGTCGTGGCTGCCAAAACTCCTATAT | | | | | | Universal |
| 3301 | cg09191327 | GCCGTACAGGAAGCTGTGCAGGATGTCGGAGGTGATAACCTCGGCCAGCG | | | | | | Universal |
| 3302 | cg09200783 | CGGTGGGCCGCTTCACCTTTTCACAGCTGTTACCATTGAGTGACAACTAA | | | | | | Universal |
| 3303 | cg09313705 | CGCTGGAGTCCTGGGTTTAATAGAGAGAGTCCCCATACGCTTGTATTTAT | | | | | | Universal |
| 3304 | cg09316860 | CGGGAATAATTTGCTTTATTTTATGACAAATGCAGAAATAAAAAGAAAAA | | | | | | Universal |
| 3305 | cg09337540 | TATTGCGCAGACAGCCCATAAATAATTTGCATTATGTTCAGCTGACAACG | | | | | | Universal |
| 3306 | cg09360996 | ATACTCAACATCCTGCTCAGAACCTTGGGGATTCATGGCACTAAAAAACG | | | | | | Universal |
| 3307 | cg09374953 | GCAATCATTGGTTCTAATCCAAGGATTGACAGAGCTACAACACACGCGCG | | | | | | Universal |
| 3308 | cg09377007 | CGTGCCAAAATAGAATAAAATCAGTTAATAGCATAGATTAAGGGTTACTT | | | | | | Universal |
| 3309 | cg09453226 | TGCACAGCGCACAGTACCGGGAAGTCGTTAATTGCTTGTATGGACCAACG | | | | | | Universal |
| 3310 | cg09482204 | TAACTTCTTCCCAAAGTGCAAGATTCTTAAATCTCCTTCAAAACATTTCG | | | | | | Universal |
| 3311 | cg09606114 | GTCGTGTTCCCTCTTGGCTTCCCATTTCCTTTCCCATGGTGTCTGGGACG | | | | | | Universal |
| 3312 | cg09646392 | TTCACTGCTTTGCCCCAGCATTGAAATATTGATTCATCTTTCAACAAACG | | | | | | Universal |
| 3313 | cg09750164 | GCATCTCCATGGGCGTCTTGGGGTCGAGGCCAAAGCCGGGGCTGTTAACG | | | | | | Universal |
| 3314 | cg09809672 | TTCATCTAGAAGGTTTGACTCTGGCCAGACAACCAGCGAGCATCTTCTCG | | | | | | Universal |
| 3315 | cg09989727 | CGAGCATTTGCAAGATGCAATGTCCTTCTTAAAGGATGTCTGTGAGGTAC | | | | | | Universal |
| 3316 | cg10045881 | GCTTCTTCTGGGATACACATTCTCTAGGTCTTTTATCCACTGAGGTTTCG | | | | | | Universal |
| 3317 | cg10128645 | TGGCTTCTGGTTGCTGTATGTGAACGAATGTTGCCTGATTATTTTAATCG | | | | | | Universal |
| 3318 | cg10186512 | CATGTCTGTGCAGTCAGGAATGATAAGTGAACCACCCGTGAATGTTAACG | | | | | | Universal |
| 3319 | cg10211907 | CGGGCAGCTCCAGGAGGGGACGGACAGGAAGCCTTTGGCCGCCTATTAAA | | | | | | Universal |
| 3320 | cg10235290 | CATTGGATTTTATATCACACAAGGACAATGTGCCATGGGTATTAAAATCG | | | | | | Universal |
| 3321 | cg10246778 | AGCATTGTAAGTAGCTAGGCCTCTCCAAATTAATGCCTTGTTTTGCATCG | | | | | | Universal |
| 3322 | cg10381180 | AATATCTTTCTTTAAAATCCTGACCCAAAACACAACGGGGTGAAAAATCG | | | | | | Universal |
| 3323 | cg10466667 | ATCCCTCTCTTCCTTTATTGCTTCCCGTATTAAGACTATTAATAAATACG | | | | | | Universal |
| 3324 | cg10559644 | CGTGTGCCGGATGCTGCCCATCTTGTTGGAGGCCAGGCAGAAATACTCCC | | | | | | Universal |
| 3325 | cg10609096 | TTTCAGGTTGACGTCACTCCCTGCCTGCTGGCTGTCAGGACTGGGGGACG | | | | | | Universal |
| 3326 | cg10677704 | CGCATTTATATGCTACAGGTTACAAAGTGAGAGCCTTGTATACACTTCAA | | | | | | Universal |
| 3327 | cg10681713 | GCCCCTGAGTGCTTATTCATCAACGTTTTCAAAAGCAAAATCACTCTTCG | | | | | | Universal |
| 3328 | cg10710448 | CGGATGTGGTTAACCAGTTTGTATTTGGCTTTGAAGGGCTTGCCCTCGCG | | | | | | Universal |
| 3329 | cg10718271 | CGCTTGACACCCTGACACTAATTTTATTCAAGCCATTGGGAAATAAATGT | | | | | | Universal |
| 3330 | cg10739250 | CGGGAAAGGTTAATTGGGGCCGCCAGAACGCAATCATTCCTTACCTAACC | | | | | | Universal |
| 3331 | cg10757510 | TGGGAATCCCTAGTGATGAGCACATAAAGCTGCCTCTAACTCAAGTGACG | | | | | | Universal |
| 3332 | cg10792727 | GAGGGCGGAGCCTGGGAAAACCCCTCTGCAACGCTGCACTGAACAAAGCG | | | | | | Universal |
| 3333 | cg10932472 | AAGGCTTCCAACTGTGACACAAGTGCAACCATATTGCTTCCTATTACTCG | | | | | | Universal |
| 3334 | cg11082761 | TTGGGGAGAGCCTGCTACAGTTCTTTGTTTGACTCCGGGACTCAGGGACG | | | | | | Universal |
| 3335 | cg11108049 | CGCCCTGTTTCTTAGCGCCGGATCCTGGGGACCAGACACGGGGAGACACA | | | | | | Universal |
| 3336 | cg11128281 | GTCGCTTCAGGATGTGTCGATCCTAGAGGGTTACGCACAAATCGTCGCCG | | | | | | Universal |
| 3337 | cg11156581 | GTTCTTAAACCAGTTGCCTACTTGTGTGGGAGTGAGGCCGGTGGCCTGCG | | | | | | Universal |
| 3338 | cg11160393 | CGCTACGGTTCGCAGCTAATGAGCATGCAGCTGGATTGCAAATGGCTGGA | | | | | | Universal |
| 3339 | cg11215098 | AATACAATGTGACATCTGGAGAATAAATTGTTCAGTCAGCCAGAAATACG | | | | | | Universal |
| 3340 | cg11217865 | CGGCAAAGGCGTTTTTATAGGGAAACTATTTATATGTAACATCCTGATTT | | | | | | Universal |
| 3341 | cg11251514 | GTGCTTCTAAATTACAATCAAACAGTTACCAATTACACAAATTATTGACG | | | | | | Universal |
| 3342 | cg11275232 | ATTTACTTTGAGGGATCCAACTCTACTAGCAACTCCTTTGCTTTCATCCG | | | | | | Universal |
| 3343 | cg11276577 | CTGGGCTTCTTGCAGCGAATTCCACACTCCTCACAAACATATTTCCCTCG | | | | | | Universal |
| 3344 | cg11327514 | CGTCCTTGTCTGGCAAAATCCACCATGCAATATTTCTGTTAGTAGGTATA | | | | | | Universal |
| 3345 | cg11480265 | CGGTCTGTGCTCCTACGTGAAACCCGAGCAACATTAAGGCTTTCAGGGCT | | | | | | Universal |
| 3346 | cg11498355 | AGAATGCTTTCATTGTAAATTCAGGTTACAAAGAAACTATACCTGGGCCG | | | | | | Universal |
| 3347 | cg11514832 | TGACAGCACTAACTCTCCAGGGCAGAACTTTCCAGTCAAGTGGATCAACG | | | | | | Universal |
| 3348 | cg11516694 | CTATAACTATTAGTAGTCATCGAACTGGTTTGTTTCTGGATGGCCGAACG | | | | | | Universal |
| 3349 | cg11664765 | CAGCTGGACGGACTCGGGTGTGGTTTGCAGCTCGGGGGCAAAGCAGCCG | | | | | | Universal |
| 3350 | cg11765970 | CGTAGACTTTGAAGCCGTTTTTCTTGCAAAGGGTGAAATCGAAGCAGGAC | | | | | | Universal |
| 3351 | cg11857072 | CGGCCGGCCTTCTGCCGCTGCCCCCTTGTACAGAATCGAACTCTGCACTT | | | | | | Universal |
| 3352 | cg11904056 | ACGTGTCAGTTTCAATAGTAGTGTCAAAGTTCACTATATACAGACATTCG | | | | | | Universal |
| 3353 | cg11978813 | TTTTTGGAAATTCCTCCTTTCAACAAGCAGTATACAGAATCCCAGCTTCG | | | | | | Universal |
| 3354 | cg12289045 | ACAAAAACACATACACAAACCGGTCACTGTCAGACTGTCTGTGAGAAGCG | | | | | | Universal |
| 3355 | cg12289788 | CGCCTGAGTGAATCAAAATGAATGTAAATGAGGTTTATTAAGTCAACCCC | | | | | | Universal |
| 3356 | cg12314723 | CCAGGTCTCTGTGGCTGGGCTGCTCCAGCCTGGCGGACAGCATGCCTTCG | | | | | | Universal |
| 3357 | cg12325485 | GGCTACCGTGCGGAGAGCGGGCTGTAAATATTTAAAAAGTCTCTCGCGCG | | | | | | Universal |
| 3358 | cg12382554 | ACAAAATCAAAATATTCATGAAACACAATGATATCTCCCCAAAGCAGCCG | | | | | | Universal |
| 3359 | cg12425327 | TGGCATTTATTCTTTATGTAGGAATATTTGTTCCTCAAAGTCAGACTACG | | | | | | Universal |
| 3360 | cg12428891 | TTAGAAGCCTTACCAGCAGGGAAGCCTGCATCTTTTAAAAACAAAACTCG | | | | | | Universal |
| 3361 | cg12449245 | TCTGGGGGCTCAGCCACCGGGGGATTTAAACAGTACATGTGATAGCCTCG | | | | | | Universal |
| 3362 | cg12459916 | GCACTCCGGCAGGTACGGCTACGGCTACAATGGCATGGATCTCAGCGTCG | | | | | | Universal |
| 3363 | cg12460432 | CGTCTGCAAGGCAGTAAAATGTTATGTATTTGCAAGGCCCATAATCTTTA | | | | | | Universal |
| 3364 | cg12501063 | CGTGGGCGACTCGGTAACGTCTGACAACCTTCAAAGAAAGGAGAAAACAA | | | | | | Universal |
| 3365 | cg12577973 | CGTCCCTCAGAGGGGAAGCCATCCTGTGGCTCTGGCCCCCCCACCACCCC | | | | | | Universal |
| 3366 | cg12642246 | AATTCGATTTTAATTTCATAGCAGAGCAGTTGATTCATGGCTCTTTGTCG | | | | | | Universal |
| 3367 | cg12651099 | TCGGAGAAGATCATCATCAACGTGGGGGGCACGCGACATGAGACCTACCG | | | | | | Universal |
| 3368 | cg12685265 | CGGCCCCAGGCTGATGTTGTGGTAATCTAATCAGCTCGGGTCCTCCACAC | | | | | | Universal |
| 3369 | cg12721805 | CGACCCTGGGAGTATAACCAACGAGGTGATTCAGGAATGAATCTGAAAGA | | | | | | Universal |
| 3370 | cg12761282 | CGCCCACTTCATTAGAATTCTAATTGGGGTGTGTAGGAGAGGATTCTATA | | | | | | Universal |
| 3371 | cg12813831 | CGTACATAAAGAAGGGCTGTTAAACTCTTGTTGAGTTATTTTTGTTTTGC | | | | | | Universal |
| 3372 | cg12818872 | AAGTTAGGCGGGATTATTTGAAAGGTATGTCACAATGCTTGACCTTTACG | | | | | | Universal |
| 3373 | cg12830057 | CGCATGAGTTGCTGGCGTAGCAAGATGCGTGATGTCATACTGGAGGAGCT | | | | | | Universal |
| 3374 | cg12896068 | CGCCTATAAATGAGAAGCGAGCTATTAACATTTGTGTATTTTCATTATGT | | | | | | Universal |
| 3375 | cg12942661 | TCCAGATAAGAGGGCGTACCTTCCGAGGGGTCAAGCCTCCGAGCCCTCCG | | | | | | Universal |
| 3376 | cg12965599 | GTAAGTAAATTTTCTCTGGCGATCAAAAGCCTGGTCGGCAACAAAGACCG | | | | | | Universal |
| 3377 | cg12973326 | CAAGGAGATCTGCATGATCAAGGTAGAGATCCAGGACATCAACGACAACG | | | | | | Universal |
| 3378 | cg13006563 | GAAAACTGTTTATGGGGGCTGTCGTCATCTGTGCACAAGCTATTTACACG | | | | | | Universal |
| 3379 | cg13068315 | AGAAGGTTTCAGGTGGGTGAAACCTCCTATTCCATGCGTAAGGTGCCTCG | | | | | | Universal |
| 3380 | cg13087210 | CGTGGCAATTCTCTGAAGCGTTTACAAGAAGAAACCTTGACAAAAATGTC | | | | | | Universal |
| 3381 | cg13151063 | CCTTCTTCTGTATGTTCATTTACACTTCTGCCTTCATCTAGCAATTTACG | | | | | | Universal |
| 3382 | cg13188467 | CGGTTTTAATTACAGTGAGGGTTTCTCTACAAATCTGTACAAGACAGTGG | | | | | | Universal |
| 3383 | cg13242392 | GAACAAAATGCCGACCGGAAGTGCAGCTGCAGGAATGACTCCCTCCGCCG | | | | | | Universal |
| 3384 | cg13275239 | CGGCGCTGCCTCCTGGCTACAGTTACACCAGCCTGCCATACTATACAGGG | | | | | | Universal |
| 3385 | cg13343102 | CGCCCGTTTGCAGGTCGCGTTTTCCGTAATAACCTTTAATGCGGCTGGCC | | | | | | Universal |
| 3386 | cg13379618 | CTGCCTTTCCCCAGCACCATTAGGAAGTTAAAATCGGTCAGTTTCATCCG | | | | | | Universal |
| 3387 | cg13383038 | GGCTAAGTGGACACTTGATTGAATACCACTAAGACAGCTCACATCCCACG | | | | | | Universal |
| 3388 | cg13400013 | TGTGAATAAAACCCTGGTCAAAAGCTCTGTCACATCGCGCTGGCAAGACG | | | | | | Universal |
| 3389 | cg13532184 | CGCCGCCGTAGTTGCTGCTGCCGCCTGCCGGTCCTCTAGCTTCGACAAAG | | | | | | Universal |
| 3390 | cg13589316 | TTTCACTGAGAAAATTGTTTAGAATTGCCTCATTCCTCAGCAGATTAACG | | | | | | Universal |
| 3391 | cg13608832 | AGAAGATGGTCCGGAAAGCCTGGCTGGCTAACAAAGACAGGCCTTCAGCG | | | | | | Universal |
| 3392 | cg13609316 | CGACCCTGATACAGTGGCATCACCCAAACCTGTTTCATCCACTGTTTCAG | | | | | | Universal |
| 3393 | cg13655781 | AGATGCCGCTCCAGGGCTTCATGTGGAAGACGAACATCCAGATGGCCACG | | | | | | Universal |
| 3394 | cg13802785 | CGCTGGAGAAGACAAGTTAGAAGAAAGGACATGAAGCTTCCAACGGCTAC | | | | | | Universal |
| 3395 | cg13830021 | GTCATCCGTCAGAGCTAGAGAGCAGGACGGTTCAGACACAATCTCTGACG | | | | | | Universal |
| 3396 | cg13851328 | CGCGCCAGGGACAGGATGTAGTTACAGGCGATCCTCAGGATGGCCAGTTT | | | | | | Universal |
| 3397 | cg13884903 | CGCTGATCGATATCTTGGTAAAATATTCATTTTTAAACTAGCGGGCAGTG | | | | | | Universal |
| 3398 | cg13916600 | GATTGGCAGTTCCCTGGCCCGGCGCCAGCCTATTGGGAGGCCTGTTTACG | | | | | | Universal |
| 3399 | cg13935553 | CGTCAGTTTGGTGCATTTGCTGCTGCTGTTGCTACTGTTTGCCTCAAACG | | | | | | Universal |
| 3400 | cg13935834 | GGATCAATGCTTTATTAACAAGAAAATGTCTTACTTCACATTCCTGTGCG | | | | | | Universal |
| 3401 | cg13953571 | CAAGCACTATTTGCAAGCGGGAGGCTCAGAAGCCTCGGCATTTGTCAGCG | | | | | | Universal |
| 3402 | cg14002724 | TGTAATTATTCTCTTAGCTTGCCCTTCATAAATTTATCTGCGTTCTATCG | | | | | | Universal |
| 3403 | cg14045036 | CGGCTCGCTGGCCCGGAATAGCTTCACTTTCTGGCACACGAAATGCTTCT | | | | | | Universal |
| 3404 | cg14136214 | GAACACAGGGGCCTTTTAAGTTGAGCGTGCGCACTGCATGGGAAATAGCG | | | | | | Universal |
| 3405 | cg14172937 | CGCCCGCCCGGCGCACACACACTCGCACACGGACACACGCTCACACCCGC | | | | | | Universal |
| 3406 | cg14297772 | CGCTCAGCTGTGCCCAGAGCGTGAGGCTGGCAGCGCCTTTAATCGCCTTT | | | | | | Universal |
| 3407 | cg14299268 | CGGTAGACCAATTAGTGAGCTTTCTAAATGAAGTAAGCTTTTTCATACAT | | | | | | Universal |
| 3408 | cg14361627 | GCCCCCCGGCTAAGTCATGTTTAACAGCCTCAGAAATTATCTTGTCTCCG | | | | | | Universal |
| 3409 | cg14381350 | CGGCCCCAACCCACGCGGAGGCCACGTGCACAGCTCCACCATCCACACCC | | | | | | Universal |
| 3410 | cg14443903 | CGCATATTTGAGTGGTAGTCCAAATAAATGCAATATAGAAATTTATGTTT | | | | | | Universal |
| 3411 | cg14498322 | CGCAGTCGGGCAGATTGGGTTAAACCAAATATTACAATTGCAAGAACTCA | | | | | | Universal |
| 3412 | cg14548925 | CCAGTGTCGCCATTGCTCTTCCTTCTTGTTGCTTTTTCCCTGTTCCTTCG | | | | | | Universal |
| 3413 | cg14551953 | TTCGCAGAGGCTACAGGTCGAAAATAGAGCACGGTGCCAGCTTCACCTCG | | | | | | Universal |
| 3414 | cg14565725 | ACCGGTCGAGGACGGCAGGAGACCCCCGAGTGCAGAGAAAGCTCAAACCG | | | | | | Universal |
| 3415 | cg14640670 | ACAGAACCTCCACCAACTGACAGTTTCTCTTCTTGACTTGCCACCCATCG | | | | | | Universal |
| 3416 | cg14656600 | GGAAGGATTCTTGAAGCCCAAGATAAACAAATTGTTCCTCTTCACGTGCG | | | | | | Universal |
| 3417 | cg14666740 | TATGCAGCAGCCCAGCGAGTTCCACTGCATGATGAACTGGACGCACATCG | | | | | | Universal |
| 3418 | cg14668921 | GATAAACAATTCCCCAAATAGATTAAAACGAAGTGTAACTTACAAAGGCG | | | | | | Universal |
| 3419 | cg14701342 | TTAACAGAAATCCTATACACTCCACTTTGTCAGCAGTTTTGAATTCATCG | | | | | | Universal |
| 3420 | cg14728312 | CGGAGCTGGATCATGGGTTAGTTGAAGTGATATTTTCCGCTAATGGTAGT | | | | | | Universal |
| 3421 | cg14762358 | CGGCGAATAAGTGGGTCATGTCTAATAAGCTATTTGTGTTCAGGAGGAGA | | | | | | Universal |
| 3422 | cg14794469 | CGGCACGTTTTTGCTTATAAAAAAAGTGCAAAAAAGATGTGGTTTACAAG | | | | | | Universal |
| 3423 | cg14821110 | CGCAGGTGCAATATGAATCAATTATCTTAATTAAGATTATGCCGCAAGCC | | | | | | Universal |
| 3424 | cg14865782 | CCAGGCAGGACGACTTGAGCGCCCGCGCATTGTGCAGGTTAATAAAGTCG | | | | | | Universal |
| 3425 | cg14903956 | GGCACACAGGGGTTGGACTGGTTCCCTATACAGATGTCCTTCTGGAAACG | | | | | | Universal |
| 3426 | cg14919591 | CGTGCCCTGTGTTACTTATTTGGGAGCCGAAAATTTATGCCCAGCTGAAA | | | | | | Universal |
| 3427 | cg14991111 | TTCAGTTTTCCAGGCCAGGCAGCCCGCTATCCTTGGATGGCCTTTCCACG | | | | | | Universal |
| 3428 | cg15006148 | TGAATATGCTAAAATGCATATCTCTGATGCACCTTTAAGCCAGAAAAACG | | | | | | Universal |
| 3429 | cg15009537 | GCTGGATTGCCTTTTGCAATTCTTACTTCAAGGCATACCCCCTTCCAACG | | | | | | Universal |
| 3430 | cg15030317 | CGCCTCAATCTAATTAGGGGTTAAAAGAGGCCATGACTGTGATGTGACAG | | | | | | Universal |
| 3431 | cg15094970 | CGTTTATGGCTTAAAACCCCAAATGGCTGATTTTTTAAAAGAGAGAGAGA | | | | | | Universal |
| 3432 | cg15171944 | TCTAGAGACAAAGTTCTGTAGTGCACTGACTTCTATCATACTCAGAGTCG | | | | | | Universal |
| 3433 | cg15237969 | CGTCCTAACCCAGCAAGGCTAGGTCATTAAAGTGGAAATGAATTCTTTCA | | | | | | Universal |
| 3434 | cg15254020 | CGAAGACCAACTGCTGGAAAATCTCACTGTCAAATCCTCAAGGACATTGT | | | | | | Universal |
| 3435 | cg15391310 | TATCCAGCCTGTGTTTACATAATCTAATTTAACAAAGTCTCAAATAAACG | | | | | | Universal |
| 3436 | cg15405572 | CGGGCTAAAAGTTCTTCCAACAGCTGTTTGTTTTGGCCATTAACATGTCC | | | | | | Universal |
| 3437 | cg15408728 | CGGTGCTAAGATGTTCTGAATTAGATTTGAATTACAACCGCTAAATGCCC | | | | | | Universal |
| 3438 | cg15437942 | TAATTTACTCGTGATCTGTTATTAACCCATCGGGTTTCGAGCTCTTGTCG | | | | | | Universal |
| 3439 | cg15511156 | CCGAGTGCTTGACAGAGATAATCTCAGCAATCCCACGGGTGACCTTATCG | | | | | | Universal |
| 3440 | cg15804249 | CGGAAAACACAGGCCAGTCAAATGTTTCTTATGAACTGTTGACACTATAT | | | | | | Universal |
| 3441 | cg15809618 | CGTTCCGGGTAATCGGTTTTCATAGCACATTCATTCTATTAAAGAGGACT | | | | | | Universal |
| 3442 | cg15813523 | CGAGACCAGCATGAGGTAGAAAAGACCATGCCAATATTTAGCCAGGGAAT | | | | | | Universal |
| 3443 | cg15828158 | CGCTGTCAACAAAATGACAATCAAGATGAATGAATCGGATGCAGTAAGAG | | | | | | Universal |
| 3444 | cg15913680 | CGGCTTGAGGAAGACCTGCTGGCCCCGCCTGAGGAATTGGACAACAGCGA | | | | | | Universal |
| 3445 | cg15991909 | CACAATTAAAGGGGCAACGCACAGATTTCAGGCACCAACCAGCAGCTTCG | | | | | | Universal |
| 3446 | cg16011662 | CGAAGCACAAATCTCATTAGCCACAGGTCAGTAAGGCTTGGAGAGAAAAA | | | | | | Universal |
| 3447 | cg16095149 | CGCGAAGCTCTGGAACAAGGAGAGAGCCAGTATCCACATGCCCCTGCCGC | | | | | | Universal |
| 3448 | cg16100840 | CGCTCCTGACCTTGCAGGACAGCTAATCCATCCGCACATCTATCTTAATT | | | | | | Universal |
| 3449 | cg16118197 | GGGCCTCAGAACCCTATGGTAGCCATGGCAACCAGCCCCTTTAGACACCG | | | | | | Universal |
| 3450 | cg16154416 | GTTTGCCATTTTGTGTTGTCCGAACTCCGCTTGCTCAGGTAGCCTTTGCG | | | | | | Universal |
| 3451 | cg16278638 | GAAAGCGCCCAATAGCTCTTGACACGCAAATGGGTTAACACAATAAAGCG | | | | | | Universal |
| 3452 | cg16378867 | CGGAACCGGTTGAAACCGGTTCAGACTGGGAGATTCCATCTCGGTTGAGT | | | | | | Universal |
| 3453 | cg16454989 | GGAGACTGAGTTTGTGGTGGCTGCTGAGCAGGGTCTGTCTGCTGTTGCCG | | | | | | Universal |
| 3454 | cg16542942 | CGCTTGAAGTTGGGTATCGCCTTTGTGAGCTTTATGAGCCTATTTTTCTG | | | | | | Universal |
| 3455 | cg16550733 | TGGGAGCTTTTCTTTCAGCACCACAACATTGCACCTAGACTTTTTAAACG | | | | | | Universal |
| 3456 | cg16571746 | CGCGTTTGCAGGAGGAGGAGTAAAGCGATGATTGTGTAATTAAATAATAA | | | | | | Universal |
| 3457 | cg16582309 | AACACCTCCCGACCAGGAAGTCATCAGGAATATTGACCAATCAGAATTCG | | | | | | Universal |
| 3458 | cg16591739 | CGCTCTCTCTTGGGCTCCTTGCAGTCCTTGGCAATGTGGCCACCTCTACC | | | | | | Universal |
| 3459 | cg16599143 | AAAAGGCCACCTATTCTTTGCTGTCCTTCACAAGAATGTATCTGAAGTCG | | | | | | Universal |
| 3460 | cg16624401 | CTCGAGGAATACCTCAATACCTCAGACAAGGCCCTTCCAATATGTTTACG | | | | | | Universal |
| 3461 | cg16671155 | CGGCCCCAGGATCACTCCGGCACACTGGGTCCCGAGGAGTTCAAAGCCTG | | | | | | Universal |
| 3462 | cg16717607 | GGGGCCGGGGGGGGGAGCCAGTGCCGAGCTCAGGCTGCACAGTAGCGACG | | | | | | Universal |
| 3463 | cg16745091 | CGGCTGCTCTCACGGCTGGTATCGCGGCTGCACCCCTGACTCATGCTGGG | | | | | | Universal |
| 3464 | cg16764906 | GTACCCAGACAAAACCCGGCCACGTGTAAGGTAATTGGCAGTATAACACG | | | | | | Universal |
| 3465 | cg16848873 | TTATAATGCAGCATTCTTTTGGACACCACACCTAGGTCGGAGCACTGTCG | | | | | | Universal |
| 3466 | cg16886381 | CGAGCCCCCCCAAGGCTCAGAGCGGTACTGGCTTTTAAAGGGAAAGGCCT | | | | | | Universal |
| 3467 | cg17114460 | CGGGGCTGCAACGTCATAATCTCTAGGGAAATCCTGCCAAGAAACGCAAA | | | | | | Universal |
| 3468 | cg17116410 | CAAACCCACAATATATTTACATCATATATAATCTTAACTGTCCAGCCACG | | | | | | Universal |
| 3469 | cg17139066 | CGATACAAGGACATTAAAGAGCATTAAACTACTTGATGACATTTTGGTCA | | | | | | Universal |
| 3470 | cg17213306 | CAATGATTTAATACAACACTGAGGAACAGCTTTCTTTAGTCTTTAACTCG | | | | | | Universal |
| 3471 | cg17251355 | CGTGAGGGTGTTTTAATACCTACTCAGAAATTACTCATGGGTCGGCTTCA | | | | | | Universal |
| 3472 | cg17266282 | CGCAAGCGAGTCATCGCAACAACACTCCCGAGAACATTCTTGTTGGGTAA | | | | | | Universal |
| 3473 | cg17311369 | CGCCTCATCTGGCAGCCGCTTTCTGGTCCAGCAGACACTAACATCTAATG | | | | | | Universal |
| 3474 | cg17318138 | CGGCAGCAGGAAAATTAATTACTGGACGATTTTCACTTCCTCTTGCAGCG | | | | | | Universal |
| 3475 | cg17356452 | ATATGGCATACAGAGCATTTACATACTCACATCTGAAATACTAGGCAACG | | | | | | Universal |
| 3476 | cg17504468 | CGGTAACTGAAGGGGACCAATTGAGCTGAACAGAGTGACTCAGAAATAAA | | | | | | Universal |
| 3477 | cg17516812 | CTGATTGCTGTTCTTTTTACTATCAAGGGACACTCTTGCCCAGACAGACG | | | | | | Universal |
| 3478 | cg17656607 | CGCATTGACCTTTGATCCTCCACCCGGACGGTGTAGGGTTCCCTGAAAAC | | | | | | Universal |
| 3479 | cg17668518 | CGACACGCGAACAATTTTATCAATAGGACCATGTAAAGGCCGACTGTGAG | | | | | | Universal |
| 3480 | cg17769560 | GACTTACGGGGACTCAGGCAAGACCAAGACGGTGACCCGTAAAAAATACG | | | | | | Universal |
| 3481 | cg17783618 | CGAGACATTAATCTTCCAATAGGTCTTTAATTAGGACAGATGCACTAAAT | | | | | | Universal |
| 3482 | cg17818266 | CGCAACTTTGCTGAAAAAGTGTTTGCCTCTGAAGTCAAAGATGAAGGAGG | | | | | | Universal |
| 3483 | cg17819031 | CTGGAGGACACATGGACCACATTCATGAAGGCCCGGCTCAACTGCTCCCG | | | | | | Universal |
| 3484 | cg17905888 | CGTAGAGAATTGCAAATCTTGTCATGGCCACGCAGAACAGCTCAAGCATT | | | | | | Universal |
| 3485 | cg18093751 | GGGGAATAGGGCGTCCCTGGCCCACTTAGCTTTTCCCCCAACTCCTGGCG | | | | | | Universal |
| 3486 | cg18349747 | TTTCAAGGCGGCCATCTTAGTGCCTCAGCTCTGAGAAATATTTCTGAGCG | | | | | | Universal |
| 3487 | cg18419637 | AACAGCCACGCCCTCATGATATTTGTGGCTACTTTGGGAAAGATGCCACG | | | | | | Universal |
| 3488 | cg18481180 | CAGACTGCCGCTGTACTGGTAATTCCCCTCACTTGATTGTGTTACTAACG | | | | | | Universal |
| 3489 | cg18526971 | CGCCTCAAGAAGTGCCTCAAAGTGGGCATGAGGCGGGAAGGTGAATATTT | | | | | | Universal |
| 3490 | cg18535797 | GAAATGAGCGTGGCACATGTTGACATAGGAATGCATCCAGCCATAATTCG | | | | | | Universal |
| 3491 | cg18543660 | TCTAATAACCAGAAAATCCCCTCTGTGGGTCCAAAGGCTCTGGCGAATCG | | | | | | Universal |
| 3492 | cg18635807 | CGGTGCCATTGGGAGTCATGGAATTACTATTTATATGAGAGTTACCGAGT | | | | | | Universal |
| 3493 | cg18684142 | CGCCCGGCCACATGACCGGCGCCGGCCAATCGCTGGATTCAACCACTCAT | | | | | | Universal |
| 3494 | cg18787121 | ATTTCCTCACTTTTTATAACTTACTTTGATCCGGCCTCTCTTTGTCCTCG | | | | | | Universal |
| 3495 | cg18814344 | CGGGTCATCTTGCCTGTCCCGCCGGCCACCAGGCCCAGGCAAGCTGCCCC | | | | | | Universal |
| 3496 | cg18894136 | CGCCACCAAATCCATTTGGCTCTATTTAGGAACTAAGTACAGGAAGGTAG | | | | | | Universal |
| 3497 | cg18955753 | CTGGGGCACGAGGCGCTCCCTGGGATCACATGGTACCTGCTCCAGTGCCG | | | | | | Universal |
| 3498 | cg19017031 | CTGTGGGAACTGGAGGTAACAGTCTACAGCCATGGTCGCCCCGCAGCACG | | | | | | Universal |
| 3499 | cg19051359 | CGATGTATCTAGCCCTTGGCAGGGTGTCAAGGACAAGAAATAATCAGTCT | | | | | | Universal |
| 3500 | cg19054310 | CGCCTCCTAGATTAATGCAGAGAAAGCGGTATTGTCTGTTGAATGGATAA | | | | | | Universal |
| 3501 | cg19090691 | TGCTTCTCAGAGCGGGGGCTTTGTGCAGCAGTCTGCTCAACAGAGGGACG | | | | | | Universal |
| 3502 | cg19134574 | CGCCATTTCCCGCCTACCGACCTGCTGCACCGCACGGACAGGGACCCGGA | | | | | | Universal |
| 3503 | cg19195912 | CGCCAGATTGTGTCTCAAGACACATATGATGAACTGAACAAAATGACCTG | | | | | | Universal |
| 3504 | cg19291109 | CTTTTTCTCTAATGATCTAGTTCCTGTAGAACTGGAATGCTTATGTCTCG | | | | | | Universal |
| 3505 | cg19296119 | TGCCTATCAGAGGCTAATAATACTGCAGCAGCGTGTTAATTGCAAAGACG | | | | | | Universal |
| 3506 | cg19296935 | CGTCTTAATTTTTTGTAATCATTTTTTGTAAAGAGGGTATAATGTCAGGC | | | | | | Universal |
| 3507 | cg19319735 | ACCTTTTCCAATCCCGGGCTGTATATGGAGATTTGGGATTCTTTAAACCG | | | | | | Universal |
| 3508 | cg19342019 | CGGGCCCACAATCACTCAATATTTTAAGAGCTGTCATCACACCAGCATGA | | | | | | Universal |
| 3509 | cg19361075 | CGATGCCTAGAGCAGGAAGAACAGAGGATGTCATTTTCATTAATTTCTAA | | | | | | Universal |
| 3510 | cg19384462 | TAAAACAATTTTAAAGTGATTAAGTAGTTTAACACCTGTCTCCCGTCACG | | | | | | Universal |
| 3511 | cg19425332 | TCAATTCAAGCGCATGGCCTTGTGCAAGGAGCATGCTCCAGCCCTTCTCG | | | | | | Universal |
| 3512 | cg19513247 | CTGTGGCTGCTGCCTGCTGCTCCTCGCGGCGAAAAGCACAAAGCACAGCG | | | | | | Universal |
| 3513 | cg19573972 | TCCTCAGAGATGATGTACTTATGCAGACACACCATGTTGGGCACACAGCG | | | | | | Universal |
| 3514 | cg19584582 | CGCGTGTTCTTGTAAGTGTGACCGAACTGATTACGATGCATATGTTTAGA | | | | | | Universal |
| 3515 | cg19692957 | AATTACTCGCTTTATTACTTTAGCCTGGAGGAATCCTGTAAAAAACAACG | | | | | | Universal |
| 3516 | cg19756587 | ACAAAGATCCAACTGTAAAAAGTCTTACGTAACAGTTCAGGACTACTTCG | | | | | | Universal |
| 3517 | cg19812206 | CGGATGACAGAGTCCAACTTTCCCATTACAGCTGTTCGTTCCTTTAAGAG | | | | | | Universal |
| 3518 | cg19891210 | CGCAGGAAGAAGAAAGAATATGTCAAATGTCTTGAAAATCGTGTGGCTGT | | | | | | Universal |
| 3519 | cg19931377 | CGATAGTGCTTTGAAGTACTGGAGTGCCCAGTTCACATCAGGGCATGCGT | | | | | | Universal |
| 3520 | cg20023049 | CATGGCTACCTGGCTGGTTTCAGCGTGCGCTCAGGTCGCCTGGAGAGCCG | | | | | | Universal |
| 3521 | cg20025209 | CGGCAAAGGCGCCAGAAAAATCTGGAGAATTCATGGACACAGGCAGTTGA | | | | | | Universal |
| 3522 | cg20033770 | CGGCTGGCCAGCAAGGGCACGGAGCCTCACCCCACACCGGTAACCCTCTT | | | | | | Universal |
| 3523 | cg20083419 | CGTTCCTAATTGCACCGTGGAATAGATCTCAGAGGAAAGTAAATCGCCAT | | | | | | Universal |
| 3524 | cg20100200 | AAAGTTGCACAATACAGAAAACTGTTGCTCCATCTTCTACTACATAAACG | | | | | | Universal |
| 3525 | cg20194417 | CGGGGATCCAGTTACGGCTCGCTCATGACAGCCCATGGGAAATACCAGAT | | | | | | Universal |
| 3526 | cg20221627 | AGGGATTTGACCCATTCCGATTCGGAGTCCTCCCTCCACATGAGTGACCG | | | | | | Universal |
| 3527 | cg20306751 | TCCGCCATTTTGGCTGCCTCTGTCGGTCTGTTCAGTTACCACGTGAACCG | | | | | | Universal |
| 3528 | cg20334331 | TCACCTCGCCTAATCTAGCAGCTAATATTTATTAGAGCCAATTTATACCG | | | | | | Universal |
| 3529 | cg20345626 | GCGCTCTTTAGCAGACGGGCTTGCAAACTCTGGTGATAAATAGACTTTCG | | | | | | Universal |
| 3530 | cg20432508 | AATTCCACAAAAGCAAACCGAGTTGGCTGAGTCTCATCACCTGCCATCCG | | | | | | Universal |
| 3531 | cg20483513 | CGCCACAGCCAGGTCTGCAGCTCCTTCAGCAGCCAGAAGTCGTCCATCTT | | | | | | Universal |
| 3532 | cg20527060 | CCATTCTATATAGTGTATTAAAGTCATTTTCCACATGCTACCTCAGCACG | | | | | | Universal |
| 3533 | cg20583171 | CTCGCATTGTGACCCTTTGATATTAATTCAAAGGGCAATTAAAGAATGCG | | | | | | Universal |
| 3534 | cg20705693 | CGCAGGTCGTCTCCAAACCCAAAATTTCCACGTCGGCAAAAGTCAAGATG | | | | | | Universal |
| 3535 | cg20804050 | CGTGCGGCCCTGACTCACGTGCTTCCGGTTTGAAGGCAAAAAGTGTGCCT | | | | | | Universal |
| 3536 | cg20865948 | GTTCCACTGGTCAGCACTTCAATCTGGTATTTACAGAAATGGTGACTTCG | | | | | | Universal |
| 3537 | cg20867091 | ATAGGAGTAGCCACACCTCTTCTGTTACAAATCATTAAAGGTGTTGAACG | | | | | | Universal |
| 3538 | cg20884304 | CGAGCAAAATTGCATTTGTTTTGCAGATTTGCTCATCATTAAATGTGAAA | | | | | | Universal |
| 3539 | cg21030623 | AGACACCCACCTGTATGAGTACGCTTGTGGATCTTGAGGTTCTCGGAGCG | | | | | | Universal |
| 3540 | cg21089733 | CGATGATCATGTGGTATAAGAGAGATAGATGGCTTTTAGTTCCATCCTGT | | | | | | Universal |
| 3541 | cg21102477 | CGGTACGCGGGAGCCCTGAGCTTCTGCGGCTGGAATGAACCAAGTGTCCG | | | | | | Universal |
| 3542 | cg21180487 | CGCCTGAGCCTCAAGAGACTTGAGGTTGTTGGTGACATTCTTCAGCTCCT | | | | | | Universal |
| 3543 | cg21390586 | CGGGATCCCAAGAGGCACTGAGGTCAAGCTTCGCTCATTACAGTAGACAA | | | | | | Universal |
| 3544 | cg21509426 | CGAGGGCAAAAGTGCTTGATTTCTGGATACCACATGCTTTTCACATGATT | | | | | | Universal |
| 3545 | cg21590845 | CGGAGCCACAAGGACAGATGTAGGCAGCGTCCCACTGATATCATCTAGAA | | | | | | Universal |
| 3546 | cg21633990 | CGCTTGAATTCACTGAACCAGGAGCCCGGGTTTTCTTTGGGCCAAGAAGT | | | | | | Universal |
| 3547 | cg21703944 | TCTGGCCGTGGTAATACGTTCCCTGCGGGCAGCTGACTGAGGGAGAGTCG | | | | | | Universal |
| 3548 | cg21839725 | TGGGATTCCGATGAATCTCCTGAGGCCTCCCCTGGTCCTCCAGGCCCACG | | | | | | Universal |
| 3549 | cg21847954 | CGAAACAACTGTGGTGATAAATCCGCCTGCAGATAATTGGCAAGAAAACA | | | | | | Universal |
| 3550 | cg22040809 | GCCTGTCATTCTACCATTTGTCTCTTCCGACAGCAAGGTCTGGTAGTACG | | | | | | Universal |
| 3551 | cg22067905 | CGCCCTTCGAATACTTGGATAAAGGAGTCCATTTAGCAAATTACCTGCTT | | | | | | Universal |
| 3552 | cg22069272 | CGTCCTGTGGCTGAACCAGAGGAAGAGGGTGTGAGATCAGGGTTCCACTA | | | | | | Universal |
| 3553 | cg22144210 | GGTCCAGGTCTGAGGACATCACCTAAACAAAGGGCCACTCAGAAACTTCG | | | | | | Universal |
| 3554 | cg22146484 | CAGCCATTGTAGTGTATGCGCTGCCCCTGCAGCCCAACTTGCAGCTGCCG | | | | | | Universal |
| 3555 | cg22212874 | CGTTAATACTCTTAGACAACACAGATCTGAAATGGTGAAACCAGCAATTC | | | | | | Universal |
| 3556 | cg22234802 | CGCCTCTTTGGTGGTAGGTTTCGACCAAAAGAATTGGAAGAGCTATGATT | | | | | | Universal |
| 3557 | cg22338839 | GCAGTATGACGACGGCTTAAAAATCTGGTTGGCAGCACCCCGAGAGAACG | | | | | | Universal |
| 3558 | cg22354333 | CGCGGAAATTTGAAATATTTGGACAGGAAGAGAAAAGAAAAGAAACCTTA | | | | | | Universal |
| 3559 | cg22409694 | CGACAGGGAGAGTAGTAAAACTGCCCCTTAAGATGGCTTTTAATAGGAAG | | | | | | Universal |
| 3560 | cg22432362 | CGGTGAATCACCTAATTAAAATCAAGACATGAATTAAGCATCCATTTTTG | | | | | | Universal |
| 3561 | cg22661680 | CGTGAACCAATTGGAGAACTTTAGAAAATTGGATCAGCCTCAATAGTCAC | | | | | | Universal |
| 3562 | cg22703759 | TCTCGAGACAGCAGCATCAATCACCACATTTTCATTATTAAGTAACATCG | | | | | | Universal |
| 3563 | cg22710034 | TACCTGACCATTGACCCTGCAGGTAACTCACGTAGTGCTCCACCTACACG | | | | | | Universal |
| 3564 | cg22901671 | ACAGGGTCAATACACAGCCAAAAGCATATACTCAGGATTAACATATCACG | | | | | | Universal |
| 3565 | cg22914193 | CGTGGAGCCTCTGAGGAGGTGATGCAATTTCATTTTCATTGATCAGAAAT | | | | | | Universal |
| 3566 | cg22943590 | CACTTTAAAAGCTACATACCTAGTTCTTTTTAATATAGGCTATTCTTACG | | | | | | Universal |
| 3567 | cg23076498 | CTCTCTCATTCCCAGAGTGCATATCGGGAATAGACACACAAAGACATGCG | | | | | | Universal |
| 3568 | cg23089474 | CGCCCGGAGCCTCACAAAAGAACAGGATGTTGTTGATTTGTCACCAAACC | | | | | | Universal |
| 3569 | cg23120731 | CGCGAATGCCATGCCCAGTTCATTTCCTCTAAGGAAACACAACCTCGGGG | | | | | | Universal |
| 3570 | cg23148651 | GAGGTCAGATTTGGAGCTTCTCATTGCACGCGGAGATTATTATTGCATCG | | | | | | Universal |
| 3571 | cg23183090 | AGCCCCTGCATTGCAGAGGGACTGGAGATCTGTATGATCTGTTTATTTCG | | | | | | Universal |
| 3572 | cg23272565 | GAAAACTCACCCAGAGAAATTTTGCAAGCATATTATTTTCCAATGTTTCG | | | | | | Universal |
| 3573 | cg23287176 | CGACTTTCCGATTCACTGCTCCTGAAATAATTTTGTGTATTAAAACCTGA | | | | | | Universal |
| 3574 | cg23314464 | AAGATATCATAGGAGGGTCGCTGTTTGACGCAGCGCCGAGCTGACTTGCG | | | | | | Universal |
| 3575 | cg23344477 | GCTCTGAACTTTATTTTCCGAGTTTGAGGAAAATTATATTCCATCGATCG | | | | | | Universal |
| 3576 | cg23415880 | CGGCGTGGGTGGGGTTGACAAGAATAGAGTACATTATGCAGTTCATTTAG | | | | | | Universal |
| 3577 | cg23423329 | CGCCATGGGGTCCCCATCTCAGTCACTGGCATTGCCCAGGTGAAGCTTTC | | | | | | Universal |
| 3578 | cg23449696 | GTCACCCTTGTCACAGTTATTGAAATTCCGCAACTCGCCACACCAGGACG | | | | | | Universal |
| 3579 | cg23567910 | CGTTTTTCTCGAAGTTTAATTACCGTATGCTAATTTCCTTGCCTACTACG | | | | | | Universal |
| 3580 | cg23573900 | TTTCTTTTTGGGGGCTGGATGTGTTCCTGGCAGGGCCGATGATGGATGCG | | | | | | Universal |
| 3581 | cg23940242 | TTTTCCTCTCAGCTATCAAATGTCACTGCCTTGAAACGTGGGCCCTTTCG | | | | | | Universal |
| 3582 | cg23948922 | TCATCCATGCACTTTAATTGAAGAACTGCACTTTTTTTACTTCGTCTTCG | | | | | | Universal |
| 3583 | cg23998570 | TACATTTACTGACATTCATCGCATCTTTGACATTGATTATCTGATCAACG | | | | | | Universal |
| 3584 | cg24087602 | CGTGTCAGAATCTTTTAAACAGAGCATGGTGTTGCGTTTATTCGAACAAA | | | | | | Universal |
| 3585 | cg24104506 | TTGAAGGGTGTTAACCTACCCAACAGCCCGTGAAGAGTTAAGTAAATGCG | | | | | | Universal |
| 3586 | cg24393114 | CATTTTGAGAATTGCATCAGACTAAAACTGATTACAGATATTAAGCAACG | | | | | | Universal |
| 3587 | cg24434315 | CACTGAGAAGTTTACTGATTTCTCCCAGTGGAATCTGCTGGAATTTATCG | | | | | | Universal |
| 3588 | cg24551749 | CGGTGTGAAATAACGGGCCCATATAAATCCCTCTGCCGCCCGCCTGCAAG | | | | | | Universal |
| 3589 | cg24557436 | ACGCACCTGTGATACTGCGCCTGCAGGAACTGGAATTCCTCTTTAATCCG | | | | | | Universal |
| 3590 | cg24580312 | CGCTCTTTAAATCTGGATATTAGTGCAGGAGAGACGGTCTTGTAGAATTC | | | | | | Universal |
| 3591 | cg24597392 | GTAATTTCTCCCTGGCCCTGTCTGCATCAGCACTATTCTCGAAAGTTACG | | | | | | Universal |
| 3592 | cg24615318 | CATTAAAGCCACTTTTCCTCTCAGCTATCAAATGTCACTGCCTTGAAACG | | | | | | Universal |
| 3593 | cg24927890 | AATATAGACGGCTAATGTCTTCAGTATGTATGAAATATCCCATATGCTCG | | | | | | Universal |
| 3594 | cg24952195 | TTAATTTGACACCTTCTGTTCTAAACCCTTTGTTTCTATTCAAAATCACG | | | | | | Universal |
| 3595 | cg25047480 | CGGTCACCCGCAGCGCCTGAAGAGGCTTCCCGTCCAGAGTCACCTCCTCC | | | | | | Universal |
| 3596 | cg25055739 | CCCAGACTATTTCCATCCTCTGATTCTCATTCCAAGTGCATCACTCGACG | | | | | | Universal |
| 3597 | cg25108269 | CGCTATTTTAACTTCAAATACTGAAGAACGCCTGATAAGGCTGAAAAGAA | | | | | | Universal |
| 3598 | cg25184118 | CGGCCCCCCCCTCGGAGAACAGTAAGGACCCTACTGGAGAAGCAGAATTG | | | | | | Universal |
| 3599 | cg25184464 | CTTTGATTTACCTTCTTCGAATGCCAAATGGAGACAGGTGATAAAGAACG | | | | | | Universal |
| 3600 | cg25195795 | GTGGAATATCAATTTTTATTGCATCACCTGTCAGGAGTGTCCAATCAGCG | | | | | | Universal |
| 3601 | cg25229850 | CTAGTTCAACCATGTCCTTGTTTTATTCTCGAGGAACCACCTGTGAAACG | | | | | | Universal |
| 3602 | cg25278124 | GAGCTGCACACGGCACTGGAAGTCACCACCAGGCCCTGGGGCTTCACACG | | | | | | Universal |
| 3603 | cg25368206 | CGGCATGTGGAAATTGACTTCCCTTGATTTAAGCTGCTGTGTCTTTTCAT | | | | | | Universal |
| 3604 | cg25410683 | TCTATGATCTACCTCAGGGGAATGGCTTTTGCCTCGGACAGCTCAATTCG | | | | | | Universal |
| 3605 | cg25467897 | CGCTAAGTCCTCGCCCTGTTTCTTAGCGCCGGATCCTGGGGACCAGACAC | | | | | | Universal |
| 3606 | cg25518911 | GGGGCGCGAAGGCCGCGGGGAAACGCTTGTGCAGGCGGTAGTCCTTCTCG | | | | | | Universal |
| 3607 | cg25615279 | CGCGTCCAAACTTTAAAATAAGGAAATACCAGAGAAAATGATCTCAATAA | | | | | | Universal |
| 3608 | cg25622623 | CGCCCCCGGAGACCCACAATTGGTCCAAAAAGCGTAAAATCAGCAATCAA | | | | | | Universal |
| 3609 | cg25639084 | CGAGAAGGTTAAATAAATAAGAGAGAAAGAACACCCTTGGCAGAAAGCAC | | | | | | Universal |
| 3610 | cg25649550 | TTCTAATGCTTTCATAAATCCAGTCTCTCCATTATGTGGAATATCAGTCG | | | | | | Universal |
| 3611 | cg25662803 | CGTCGTTATCTTTTGCAAAATACAGCCCTGGAGATCTTTATGGCAAACAG | | | | | | Universal |
| 3612 | cg25687751 | GAGCAAGCAGGAATACTACATCCGGGTCCTAATGTCCATTGCCATTTGCG | | | | | | Universal |
| 3613 | cg25694286 | ATCCCGTCTCTTTGCCTTTTATTTTTGGCGGCCTCCTTTCGAAAACTCCG | | | | | | Universal |
| 3614 | cg25699407 | CGAGAAGGTTCACACACCCCCTCTATTCATTCCTCTTCCACAGGTGTGCG | | | | | | Universal |
| 3615 | cg25771548 | GCAGCTCCACTCCTGAAGACCTTCAGCTTCTTGGGCTTTGAGATTGTACG | | | | | | Universal |
| 3616 | cg25805807 | CGCCAGGCTGGAGCAGCCCAGCCACAGAGACCTGGGCATAGAGCACTGCA | | | | | | Universal |
| 3617 | cg25950871 | CGCACGCGCTCCCATATAATTTATGACTGCCTCTGGTCCTGATGACAGAT | | | | | | Universal |
| 3618 | cg25960060 | CGCGTTCACATAATACGAAGAACTCATAATTTTGACCTGTGATTTGTTGT | | | | | | Universal |
| 3619 | cg26032884 | GAGGCTCTCCAGCGCCACCTTGGGGTCGTGCAGGAAGTGCGTGGTCTGCG | | | | | | Universal |
| 3620 | cg26045960 | GGAGCTGAAGCTGATGGCTCCTCGGCGGCTGAGGACGTGCTGGGGGACCG | | | | | | Universal |
| 3621 | cg26062663 | CAAAGGACCCTCCAACTTAACCAGCGTCATTGTCCATTTAACCCACATCG | | | | | | Universal |
| 3622 | cg26102159 | GCTCTGTGCACTGAGAGACTGTATCCCCTCAGTTGGCAGGCAGAGCTCCG | | | | | | Universal |
| 3623 | cg26234822 | CGCTCAGATGCAGCAGCACCATGTTCACGAGAGTACATGGGCTGTCCTAT | | | | | | Universal |
| 3624 | cg26275174 | CCCAGCTCTCTTTTTTTTCCTGATCAGCTGATGAAGAGACTAGCAGCTCG | | | | | | Universal |
| 3625 | cg26363341 | CGTGAACTTCCATATCAAGAAGCCCTCCAAGTACCCACATGTGCCCCCTC | | | | | | Universal |
| 3626 | cg26420776 | CGGTAATGTATAATAACCCTTTGGGCAAGAAACCCAGTCCCCGCAGCAGC | | | | | | Universal |
| 3627 | cg26474314 | CGTTGATTATGTTTCGATTTTCGTTCAAGGGCCTCTGCTGTTCGTTCTTT | | | | | | Universal |
| 3628 | cg26581729 | CGCCATAAGTGCCCCCAGAACTTCAGCGCCCACCATGGCGCACAAGGCCG | | | | | | Universal |
| 3629 | cg26598122 | CGGGAATCCTCTCCAAAGAAGGAGGAGACTGTAGCAAGTAAGGCATAGAG | | | | | | Universal |
| 3630 | cg26603143 | CGCTGTTTGGATTTCCTGATTTTATAACAGGGGGGCTGGTTAATATCTCA | | | | | | Universal |
| 3631 | cg26616379 | ACAACCCAGTTTAAATAAGAGTCTCTGAAACTTCGCTCTCAGCCACAGCG | | | | | | Universal |
| 3632 | cg26781330 | GTAAACGTACCTGTCCACAGCCCGGGGCATTGCACACAAACGGTCTGTCG | | | | | | Universal |
| 3633 | cg26845448 | CGAGAGCAACCCCTTCACCGAAATAGCCATGAGCAGCTGCAGGTACAACG | | | | | | Universal |
| 3634 | cg26885075 | CGGTTCACAGACCTCTTGAAGGAAAGTTTGTTTTCCACTCATAGATGAAA | | | | | | Universal |
| 3635 | cg26920416 | CGGGTTTCCAGTGGGCGCATCAGTTACAATGACATGTTTGAGATGCTGAA | | | | | | Universal |
| 3636 | cg26957053 | CGACAATGACAGCAGCATCTGGAACTACCCGCCCAACCGGGAGATCTCCA | | | | | | Universal |
| 3637 | cg26989456 | CGGACCACCAGTTTCCAATAAACCATAAAAGGCCGATCAGCAGCCATTGT | | | | | | Universal |
| 3638 | cg27035369 | TGCAATCAGTTTCCGAAAGGTCAGCCAAGGTCCTCCGGCTCTCGCAGACG | | | | | | Universal |
| 3639 | cg27096599 | GAACAAAATCCACCAACACGGTTCCAGTAACCTCCGCATGTCCGAAAACG | | | | | | Universal |
| 3640 | cg27208859 | GGTTGTTTATGCACACACAAGGCCCTTTGAAAATAACCCTTTTCATGTCG | | | | | | Universal |
| 3641 | cg27242082 | CAAGTGGAACAGAATTCCCTATGGTCAAATTAAGTGATCTCTTTATTTCG | | | | | | Universal |
| 3642 | cg27275508 | CGGGGAGATAAAACTCTCATAGCCCTAACTGTCAAATAGGGCCCTTTTCA | | | | | | Universal |
| 3643 | cg27291660 | CGCGGATGGAAGACAGGCATGCAGAGGAAATCAAACCTACAACCGCGACA | | | | | | Universal |
| 3644 | cg27294582 | CGGTGATTTACTTCCCTGCAAATGAGTTGTTTCATATTTTGCACTGTCTT | | | | | | Universal |
| 3645 | cg27492942 | CGGATGTTATTTGTACGAAGGGCAGTTCGTAAACAGCACTTGTTCTTTTA | | | | | | Universal |
| 3646 | cg27547112 | TTTTCAGGTCCTGCAACACCATACCCACACTGCAGCCATTTAGCATGTCG | | | | | | Universal |
| 3647 | cg27593991 | GTGATTTTGCTAAAATGCATCACCAACAGCGAATGGCTGCCTTAGGGACG | | | | | | Universal |
| 3648 | cg27637521 | GGAAACTTGCTGTGGGTGACCATGGCGCACGGAGCCAGCGTGGATCTGCG | | | | | | Universal |
| 3649 | cg00101675 | TCCTAAAGAAACTTCAGCAGTGCTGTGTCATTTTTGACTTCATGGACACG | | | | | | Universal |
| 3650 | cg06259996 | CGGCCAATTCACCTGCGAGGGCTGCAAAAGTTTCTTCAAGAGGAGCGTCC | | | | | | Universal |
| 3651 | cg20146241 | TTCACTTTCACAGACATGAACCACCACGCTGGGTGTCGACTCTGTTCCCG | | | | | | Universal |
| 3652 | cg03747401 | AGCAGCCATTAGCACGTCATTGGTAATCCCAGCGACACCTTTCACATCCG | | | | | | Universal |
| 3653 | cg15403305 | CGGAGCCTGCCTCCAGACTGTTGGCGTTCACGGCTCTGCCTCGCAGCCTC | | | | | | Universal |
| 3654 | cg20236179 | CGTGCCCACGGTCACCGCGATCACAACCAGCCAGGACCTCCAGTGGCTTG | | | | | | Universal |
| 3655 | cg01910711 | CTCAGAGCACAATTGCGTTTCCTGCGGGTTATTTTTGGCGTGGGAACGCG | | | | | | Universal |
| 3656 | cg24312350 | CGCGCTGCAGCCCCCCGCTCCGGAGCGGCCACTTGTCCAGCACCTTTACC | | | | | | Universal |
| 3657 | cg08180952 | GTGGGGGGGATTTCCCGGGTAACAGAGAAGCGGCCGCGGCGGTAGAGGCG | | | | | | Universal |
| 3658 | cg10040836 | CGGCAGTACTGGCACTGGTTGCGATGGTGCTGGTCGATGGGACAGTTCCG | | | | | | Universal |
| 3659 | cg11686722 | CGGACTGGGATATTAAATATACGACACATCCAGGAGTTTATTGGAGCGCA | | | | | | Universal |
| 3660 | cg18418719 | CGTGGCCGCCATATTCAACGAGGCCGTCCTCGCAAATACTGCCCCGATGA | | | | | | Universal |
| 3661 | cg07727941 | CGCCACCATCGACCAGTGCCCCACGCGCATCGAGGAGACCTCGCCCATCG | | | | | | Universal |
| 3662 | cg25066947 | CGCGGGGCGCCCCATTGACTGGGCCCCGAGCCCCACTTTTCACAAACTCC | | | | | | Universal |
| 3663 | cg02828846 | CAACACCCACCGGTAAGAACAGGAGGTATTTATATCCAATTTAATTATCG | | | | | | Universal |
| 3664 | cg22844979 | CGAGGATTTTATAATGGCATATTTTTTCAGTATTAAAGCGAAAATGTTTT | | | | | | Universal |
| 3665 | cg15229894 | GACGAAGCGGCTCCTCTGAACCCCGGGATGTACAGTCAGAAGGCGGCTCG | | | | | | Universal |
| 3666 | cg02499612 | CGGCCCATCTCCGACCGCTTCCTGATGCGAGTCAACGAGTCGTCCTGGCA | | | | | | Universal |
| 3667 | cg18468088 | ACCAAGTCCTGTAACATGCCTGGTATTCCCAGTTATCCTCACCTTCCGCG | | | | | | Universal |
| 3668 | cg04186556 | ATTTCCTAGCAGGTTTTCACGGACCCTAGCAACCTTCAGCGGCACATTCG | | | | | | Universal |
| 3669 | cg17201550 | CGGCACCTCCATGGTCACCGGGATGATGAGCGCATCCATCTTGGGCTCGT | | | | | | Universal |
| 3670 | cg18573296 | CGATGGAGTCGTATGATGCCCTTGCCTTGTTTTATATTGGCTGTCAGCGC | | | | | | Universal |
| 3671 | cg27495736 | TTCCCACAGTAACAATCGAAAGCCACGGTTGCCCTGGAGACGCGGGGGCG | | | | | | Universal |
| 3672 | cg03708116 | CGGACCCGACACACGCTCACCTGGCTGAGGCCCCCGCCCCCCACAGGCAG | | | | | | Universal |
| 3673 | cg00900734 | CGCCATTCGACACAAGCCGCTGAACATGTCATCCCGTTTTTCACCCAGGG | | | | | | Universal |
| 3674 | cg00535482 | CGGCTCGCGCTTTGTATACTTTGCACTTGAAATCGTTACATTCAACTGAA | | | | | | Universal |
| 3675 | cg13496662 | CGCCAGTGACCCTGGCAGCTGGTGGGGAGGGTGTCCTCCGCCTAGCCTCA | | | | | | Universal |
| 3676 | cg02041553 | CGGCCACCCCTCGCACCACGTACCCCGCGGCCTCTTTGTTGTTGGGCACC | | | | | | Universal |
| 3677 | cg22113843 | CGCCGCCATTTTGTGTCCCCCTGTTGTTGTCGTTGACATGAATCCGACAT | | | | | | Universal |
| 3678 | cg25210084 | ATACAGCGCTCAGCTTCATCCTTGTTGGATTCCATGGCGGAACCAGAACG | | | | | | Universal |
| 3679 | cg12756474 | CGCCATTTGAAATGCTAACACAATGAATATTTTCTCATTGGTCTGTGTCC | | | | | | Universal |
| 3680 | cg01486146 | CCCATCAAAAAACTTCTATTAGTAATGGAGACCTCGCCGGAGACCTTCCG | | | | | | Universal |
| 3681 | cg13909487 | CTCGCCTTAATCAATTAGTTCGTGATTTGCTGCAGACCCCTGTCTCTCCG | | | | | | Universal |
| 3682 | cg12053353 | AATTATGCTGAAATAAAGGCCATTCAATTTGCTACAATCAGTAACTTTCG | | | | | | Universal |
| 3683 | cg13233081 | TTTCTTCTAGCTACTTAAAGGCATTACTGAATTATGGGCATCACAAAACG | | | | | | Universal |
| 3684 | cg18141557 | CAAGATGGTCCAGAGCGACTTCATGCAGGGGGCCATGGCCGCCAGCAACG | | | | | | Universal |
| 3685 | cg15741341 | CGGCCTGAAAAACACCTCTGTCATGATGGTGGATCTACTCGCTCACACAA | | | | | | Universal |
| 3686 | cg27072792 | CGGGGCGAATGGCTGGCAATCTTACTGGGATTACAGAACAAAGAGCCTCC | | | | | | Universal |
| 3687 | cg26312920 | ACATTGATGCCAACTGCCAGAGCTGGTACCCATGCCATCTGCTAGTGACG | | | | | | Universal |
| 3688 | cg01846532 | CGTTACATGGCTGGTTGCAGCCTCAGATTAATGCGAAGACCCTGGCGATT | | | | | | Universal |
| 3689 | cg21132526 | CGACAGTTCAGCACAAGATCAGTGACATTCTGTCTCATTAGAACCACGCT | | | | | | Universal |
| 3690 | cg16554811 | TTACTTTTCAGTCCCTATTTGGAACTGCTCTCGCGGCAGTTCAGACCTCG | | | | | | Universal |
| 3691 | cg00650422 | AAGATCACCGGCCTCTCCCTCACCCAGGTCAGCAACTGGTTCAAGAACCG | | | | | | Universal |
| 3692 | cg26589497 | CGCAACTCCATCACCGTGCCCTACAAGGTGTGGGCCAAGTTCGGACACAC | | | | | | Universal |
| 3693 | cg07373156 | CGGTTTAATTGCGCCGAGTTTTAAAAGGTCCTATAAATGTAATTGGTATT | | | | | | Universal |
| 3694 | cg11214667 | GCATTTTACGAGTTCTTTCCTCTACAGCTATAAAACTGCAGCTTCGATCG | | | | | | Universal |
| 3695 | cg11407867 | CGCCCTTCATCTAGGTAGGGGTGGGCTAAGGCATCCTTAGCGGATATTCT | | | | | | Universal |
| 3696 | cg16367356 | CGGGCAAATCCCTGCATCATGCTGATTTCCAGTTTTGGAATTGATACCAG | | | | | | Universal |
| 3697 | cg16981766 | GCTTATTGTCAACCTCAGAGAAGTGTATATGTTTCCCTTCATACATCACG | | | | | | Universal |
| 3698 | cg11864223 | CGCTTGACACTCACACTTTGTCCCTGACTGACTATGCTTGTGGTTCTCCT | | | | | | Universal |
| 3699 | cg14397160 | ATCAAATTCATGTCGTAATTAAAGCTGTCAGTTGGAAGGCAAGCCAATCG | | | | | | Universal |
| 3700 | cg06799948 | CTCCAAATCAGACTTAAGGATTGTTTTATTATTTAATTACACAATCATCG | | | | | | Universal |
| 3701 | cg01938132 | ATTGCTGTCTTTTGTAATCCATCCATGCAGTCGCACCAGAGCGATTAACG | | | | | | Universal |
| 3702 | cg26736130 | CGACATTTAATAGTGCTAATTGCACTCCAGTTAAATTGCCCTGATTGCAG | | | | | | Universal |
| 3703 | cg14412072 | CGGCTGCCATTAGGGAAATGGGCATCATTCTTATTGATCCAGCATGGGCT | | | | | | Universal |
| 3704 | cg15810562 | CGCTTGAATACAATTTGTGTAACCTTGGCCAAGACAGCCTGTCATTTTAA | | | | | | Universal |
| 3705 | cg17041137 | ATCGCACTTCTGGATTTAATCAACTTTTTTATCCAGTGTTCAGGATGTCG | | | | | | Universal |
| 3706 | cg15686078 | CGGGGCTTGAGGGTCTCGGGGCCCCTCGCTAATGTAAGGTTATTGTAATT | | | | | | Universal |
| 3707 | cg24148137 | GGCTGCAGGATGGGCTGTATCCAAAGCATCACCTGCAAGGCGCGGATCCG | | | | | | Universal |
| 3708 | cg23128382 | CGAGAGGGCTGGCTCTTCAAATGGACCAATTATATCAAAGGCTACCAGCG | | | | | | Universal |
| 3709 | cg18169540 | CGCATGGCCATGGGAAACCCCAGTGAGTTCTTTGTGGATGTGATGTGAGC | | | | | | Universal |
| 3710 | cg11254527 | CACAAGTATAAGATACTGTCTGGATCATATTTTTCACCATTTGGTCTCCG | | | | | | Universal |
| 3711 | cg11672180 | CGGGACAGATAAAAATGAGCAGCATCATATTGTTTGACAGAATGATCTCG | | | | | | Universal |
| 3712 | cg26472530 | AAGTTAAGTTCCTGCGGACGCTCCTCTTGAAGAAACTTTTGCAGCCCTCG | | | | | | Universal |
| 3713 | cg26659116 | AACAAGGACATATTTTATTGTGCCCATGTTGTGGCACTGTCTTTATACCG | | | | | | Universal |
| 3714 | cg26879535 | CTACTATTGCTTATTTCACACTTCAGTAGGTAAAGATGCATTAATAATCG | | | | | | Universal |
| 3715 | cg12394655 | TATGAAGACCAATACACTCATACAGCTAGATAACCAAAGATAACAACTCG | | | | | | Universal |
| 3716 | cg07069838 | CGCAAGTGCTAATCAGCTCCATTGACACACACAGGCTGGGGCTACAATCC | | | | | | Universal |
| 3717 | cg07265990 | GAGCTGAAGTTTGTTTCTCCTTCCATCATTTCTTCCTCTTCTAATGTTCG | | | | | | Universal |
| 3718 | cg05544360 | TAAGAAATTCAGTCACAATAGAGAGCCTAGTTTTGAACATGTTTCACTCG | | | | | | Universal |
| 3719 | cg09108310 | CTGTTTACCTCAAGTTTGAATTTTATCTGCGCAACATTAGCTGGAATGCG | | | | | | Universal |
| 3720 | cg09784081 | CGCAGATAAAATTCAAACTTGAGGTAAACAGAAGAAGAGGAGGAGGAGGA | | | | | | Universal |
| 3721 | cg10042482 | CGGCCAGGCGCCAAGAAATCAGCCCCAATTACTATATTCACATTGTCAGT | | | | | | Universal |
| 3722 | cg13301933 | GTCGGGGGCTGCCGGAGCTGACTCCATGTTTTTTCCCAATGTAGAGATCG | | | | | | Universal |
| 3723 | cg16697952 | CCCAAGGCGATTGTCATATGATAGCTAAGAAGTGGCACATTAATGAAGCG | | | | | | Universal |
| 3724 | cg02681015 | ACTTACTTTTGGCTAGCTTCCTCGCCCTCGCCTTGGATCGCATGGTGTCG | | | | | | Universal |
| 3725 | cg09557545 | CGAAGCTCCCTGCTGATCGATTATTTGATAATTGATTTTCCCCGCAGCCA | | | | | | Universal |
| 3726 | cg07774376 | AAAGATGACCCGAAGCACAAAGCAACTGACAAACAAGTCCGGACAAATCG | | | | | | Universal |
| 3727 | cg01797373 | CGACTGAGTCATTTGTTTTGATTACCCGGGTGATTGCCAAATGTTAATTT | | | | | | Universal |
| 3728 | cg21102110 | CGGCCCATAAACTAGAATAGCTATGAAACACAGGCTGCCTTTATGTTGAA | | | | | | Universal |
| 3729 | cg21197642 | CGGAGTGATAGATACCCATAACTCAGAGTCCTTAATTGTACTTAATTTGT | | | | | | Universal |
| 3730 | cg16925789 | CCACTTTGCCAAATTAATTTTGACTCCCATAATTATTTGCTGTAGGAGCG | | | | | | Universal |
| 3731 | cg18679961 | CGGAGCCAAGTAACTCTATTTTATTATATTTGCTGGGAAATGAACTAGCT | | | | | | Universal |
| 3732 | cg18743610 | TGTTCTGCAGCAGGGCCTGTGTGAGAAAACAGCCTTTGCTTTCTCCTACG | | | | | | Universal |
| 3733 | cg19271316 | CGCAGTGACCCCCCTGGATTGTTATTAGGCCGGTTGGACATTGGCACCTC | | | | | | Universal |
| 3734 | cg20059238 | CTTGCCATTGCTGGTCAGCAATAATCGAACCACTTTCTGGGGATTAAGCG | | | | | | Universal |
| 3735 | cg20391664 | CGGGTTATATATTTTAGAGAACCTCATTAAGTGCTTTTTAAAATGAAATT | | | | | | Universal |
| 3736 | cg20621276 | CGCCTTCCTCATCGGCTGCATGTTCATCAAGATGTCCCAGCCCAAGAAGC | | | | | | Universal |
| 3737 | cg24080303 | CCATGATGTCGTGAAAATGCATGTTGACAGCCTGGTCCACTGATTGTTCG | | | | | | Universal |
| 3738 | cg16816020 | TATTTACTTTTCTCATAAACAAATCAGCTTGGGTGCCGTCAGAGCTGACG | | | | | | Universal |
| 3739 | cg16960327 | CAGCTAGACCCGCCCTGGTTTCTACCTCCGAAAGAGTCAAGGCTATTCCG | | | | | | Universal |
| 3740 | cg23692250 | CGGTGCAGAACATGCTATAGTATTGTAGTCATTTATGTAATGTCATTGAA | | | | | | Universal |
| 3741 | cg09642734 | CGGCCCGGTTGGCACCTACCCACCAGGATGCTGGCAGTCCTGCCCTCCTC | | | | | | Universal |
| 3742 | cg25072946 | AACAGCAGAGAAATAAATTAAGGGATGCAGTGGCCACCACCAGCCAAGCG | | | | | | Universal |
| 3743 | cg25172570 | CGGGCTCTTTGGTAACAAACCAACCCTGACTTTAGGAACCAATACAAACA | | | | | | Universal |
| 3744 | cg00493843 | CGGGCTCTTTCATGCCCCATCAGAATTGTAAATGAGGGGTCTGTGGGCAG | | | | | | Universal |
| 3745 | cg00935831 | CGGCGGCTGAAATTGAATTGATAACTGCATCAACGTGCCAGATAACGCCT | | | | | | Universal |
| 3746 | cg02270238 | CGGGAATTTATTTGCCAGGAAGGATGATCCCATCATACTGAAAGAGAAGA | | | | | | Universal |
| 3747 | cg14472711 | TTACAAGGTCCTTCTTCCCCGTAAAACTTTGTCCAAGTACCTCATGTACG | | | | | | Universal |
| 3748 | cg00399596 | TCCCTTCCATCTTGACTTTTGCCGACGTGGAAATTTTGGGTTTGGAGACG | | | | | | Universal |
| 3749 | cg05207134 | CGCTGTAATCTCTAATATGTTTTTTTCTAGGTGATGCTGTCAGATAATGG | | | | | | Universal |
| 3750 | cg23274273 | CGCCGACAAAGAAATCTTGCATGGAGACTACAAGTCTGGAGTTTCTGGGA | | | | | | Universal |
| 3751 | cg16701192 | CGTCACCGGGGGGGTGATGTAATGCACTCTAAATAGAATGTATTGTAATC | | | | | | Universal |
| 3752 | cg16848740 | CTTCATAAACCTTATATGCTTATAAAACAGCATATAAAAATTTAACAGCG | | | | | | Universal |
| 3753 | cg17455697 | CGCCTGCAATCCCACAATCAGTGTGCACTGTAATTGTCGAATTTGATGCT | | | | | | Universal |
| 3754 | cg22454306 | CGTCCCCCCAAAGACAGGGGACAGATGTTTAACATCAGCCTATTAATCCC | | | | | | Universal |
| 3755 | cg16986738 | TCCCTGGAATGTTTTTGACTTCCTCATCGTAATTGGCAGCATAATTGACG | | | | | | Universal |
| 3756 | cg25326872 | ACCCATAACTCATTAGTGTTGAACTCACGAGGTATAAAGACCAACGCACG | | | | | | Universal |
| 3757 | cg26748472 | CGCCCTGAAATCTATTTAAAGAGAGGGAAAGGGGAGGAGAACAAAGGGGG | | | | | | Universal |
| 3758 | cg07978738 | CGGGCTGGTGGCACCTGTCCTTGTGTCTCGTGGTATTTACTGTGCTACCT | | | | | | Universal |
| 3759 | cg02007453 | CGGGGCTGTTGAGACTTTCTGGCATGGTGGTCATGGTCATCTCTTCTCGC | | | | | | Universal |
| 3760 | cg02471195 | CGGCCTATTTGGTATGGTCTTTTTATTGGAAAATGACAAAGGGGTTATAG | | | | | | Universal |
| 3761 | cg12945551 | CGTAATGGATGAGATATTTACAGCAAAGCTGTTAAAACATTGAATAAAAT | | | | | | Universal |
| 3762 | cg18851565 | CGCTGCATCTTCTGCATGTGCCACTTTTGGGAGGACGTTTGAAACTTACT | | | | | | Universal |
| 3763 | cg07800922 | CGACTCCCTTGATAAATGGGACTTCCAGACCACACTTTATTGAGTCTCTG | | | | | | Universal |
| 3764 | cg10707234 | CGTGTAGAAGCGAGTCTGCTCAACAGCTTGTTATTTGGTGGATTGTGGCA | | | | | | Universal |
| 3765 | cg12648670 | CGACACGCTCAGCTGCATCTTGTTAAAAGCTTCCTGCGGGTTGGCAGAAT | | | | | | Universal |
| 3766 | cg13959241 | AACCCCTTATTTACATTTTGCGGTTATTTTGAGCCTTTGCCATCTGTTCG | | | | | | Universal |
| 3767 | cg05901294 | CGCCCGAAAGCCCAACAAGAAAATTTGTAGGAAAGGAGGTAGGTAGCGAG | | | | | | Universal |
| 3768 | cg19691778 | CGCAGACGATCTCTCGCACACTCCTCTCCGGAGACAGAAGTATTTGTTTG | | | | | | Universal |
| 3769 | cg14023941 | GAAGATTAAATTAAGTATCATATCTGCTGACCCTATTGCCATGGTTACCG | | | | | | Universal |
| 3770 | cg08522676 | CGCCCTTGTCTAGACTGGAGACGACACCTCCTCTGTGTGTAAACAGAGGC | | | | | | Universal |
| 3771 | cg09010707 | CGTGGGGCCAGGGCTTCCTGGGTTCAGCTACCAGCCGAGACTCTGAGTCA | | | | | | Universal |
| 3772 | cg09939922 | CGAGCCATGATAGAGAACTTCAATGCCAAATATGTCTCCCTGCATGTCAG | | | | | | Universal |
| 3773 | cg10426441 | ACTGCTTTGACCCAGAAGCCTGGGATATGCTGGATGATGAGGTCTCTGCG | | | | | | Universal |
| 3774 | cg15600660 | ACCCACAGATACAATGGGTACCTTGAACTCGCTCAATTGATGCAGGCCCG | | | | | | Universal |
| 3775 | cg06807725 | TTAACTCCTCCTTCTGTTGTCAGAAGAATGTTATTCCCCTTCACATCACG | | | | | | Universal |
| 3776 | cg07071132 | AGGAATTTACTGCAATTCCTTGCGGATTTTGCACATACAGCTCGCAAGCG | | | | | | Universal |
| 3777 | cg04902782 | ATCTATTGTTGCACTTCATAATGAGAAGGCAGATTTACTGCCTTTTACCG | | | | | | Universal |
| 3778 | cg09716123 | TCCCCTAATCAGGATGGAGACGCAGTTCATTACAAGCTGGTGAGGCAACG | | | | | | Universal |
| 3779 | cg11124915 | TGCCAGCAGTCTTGGGATAGTGCTGAGGTGCACCCCTACTTCCTCCTCCG | | | | | | Universal |
| 3780 | cg12591580 | TCCTATAATGATTACCTGCGGGCGGCTCAGATGCACTCTGGCTACCAGCG | | | | | | Universal |
| 3781 | cg08375909 | CAAGCAGTGTGACCAAAAGAAAATATTCCAAAGCTTGTCACGTATGACCG | | | | | | Universal |
| 3782 | cg09462662 | CGGCCGCCAGCCCAATTGGCAGCTCTCCATCGCCACCAGTCAATGGTGGC | | | | | | Universal |
| 3783 | cg05052242 | CGGGTAATTGGATTTATCTGGTTTTAGAATTTGTTAGGTTCTGTTGCAAA | | | | | | Universal |
| 3784 | cg06059859 | TAAACAGGCACCTCCGTCCCTGACCTACTTTCTGCCTTCCCTAAATGTCG | | | | | | Universal |
| 3785 | cg00422680 | CGGTGTTATTGTGATTTAAATCCAAGCTCTATAAAAGAGAGCAGTTCTTT | | | | | | Universal |
| 3786 | cg14116948 | CGCTGTGAGCCTCAACACCACAGGCTGCAGTGCTCTGCGACAGAAAAACA | | | | | | Universal |
| 3787 | cg08396875 | GATGCAGCGATGGGCTGCACTGCCAGCATTGTTCTGCTTCAAGCTTTTCG | | | | | | Universal |
| 3788 | cg27052685 | CGCTTTCCACACGTGGCAAATGATTGCCTCGGTAAAGGTATTTTCTGTTT | | | | | | Universal |
| 3789 | cg25530799 | AAACATGTGTTTTCAGGATTTTCTTTTCACATGCCACACAAAAAGTAACG | | | | | | Universal |
| 3790 | cg17820491 | CGCCCTGCTGGAAAAGAAGAAACTCATGGCCGCTAGGGAGCGCAAAGCCA | | | | | | Universal |
| 3791 | cg11458204 | CGACTTTTGTTTTAATAACAAAGTTGTTGATTTTCTACTAAGGGTTCTTT | | | | | | Universal |
| 3792 | cg08160490 | CGCTGGGAAATAGATGTTCTGTCTCTATGACAATATATTTTAACTGACTT | | | | | | Universal |
| 3793 | cg10013179 | TCCTGGAAGGCTGTCTGACATCACCCCGTTTCTTGTCGGCTGATGTTTCG | | | | | | Universal |
| 3794 | cg25073174 | CGGCAGGGTGTGGAACCTCGACATGACCCCCAGCTGTTCTTTGTAAGGGA | | | | | | Universal |
| 3795 | cg25468783 | CGGGCGATGTTAACATCTCATTATCTTTGTTACTGTAATTACATTATCCG | | | | | | Universal |
| 3796 | cg26154615 | CGGGTTAGGAGGCAAGCACATTACAGCTCCATTTTACCTCTGCAGGCATC | | | | | | Universal |
| 3797 | cg09176584 | CAAAGGCTAATTTGGTTACCCTCCGGATCCACAATAGCGAAACTGTGTCG | | | | | | Universal |
| 3798 | cg07499079 | GAGAGGTCCAGACTGGCTAAATCGTTGCTTTGGTTCAAGCAAGGCACTCG | | | | | | Universal |
| 3799 | cg10324939 | GGTCGTGGTAATTTACATCCTCTCTGTGTACATTAACTTATCTGCAGCCG | | | | | | Universal |
| 3800 | cg06158983 | CGACTTGGTCGAGTAGTTGATGAATGGCTACTCGACAAAGGTAAAAAACA | | | | | | Universal |
| 3801 | cg14988489 | GGAACACCATAAACGGGCTAAACGATGAAATTAACAAGCCATCTGAGGCG | | | | | | Universal |
| 3802 | cg15444935 | CGTCTTTGTTTGAAGGTCTTGGCAAACTGCTCAAGCTCCTCAAGGTCACT | | | | | | Universal |
| 3803 | cg16390944 | CGCTGATTGGCTGCCTGTTTGGATACATCTTTAGGGGAGCCTTGAAACTG | | | | | | Universal |
| 3804 | cg16545804 | GAAGGCACAATTTCCAGCAACACAATAAAATGTGCAGTGAATTTATGGCG | | | | | | Universal |
| 3805 | cg24713486 | CGGCTGCAGTGCACCAACTATCTTGGAGTGAATCTGAGCCCCAAGCTGGC | | | | | | Universal |
| 3806 | cg24856447 | CGACCATGAAAGGATTCAGCGTCTTGAATGAGACAGCTGCTTGTACAGAG | | | | | | Universal |
| 3807 | cg25034090 | CGGCCTTTGGGATTGTCAAGCTTAGTCAAGTCTCTTTGCAGCCGTGAGTT | | | | | | Universal |
| 3808 | cg26653463 | GGAACACTGAGACCTGTTGCCAATTTGAGTGAATATAGTGACTGTACTCG | | | | | | Universal |
| 3809 | cg25118671 | GGCCTCGCAGATTTTGATCTTAAGAAGGCCATTGAACACTACCATGGTCG | | | | | | Universal |
| 3810 | cg26922708 | CGTGAAGACTTAATTGCCTTATGGACATGGAAAGAATGGAGGGGCTTCTC | | | | | | Universal |
| 3811 | cg04533279 | CGCAGACATAGCCATAGTCGTAACCTGGGGACAGCATTTAAATACAGACG | | | | | | Universal |
| 3812 | cg11417778 | CGACAAGATGATATTAAAGATGAATCTTCGGAGTTTTCAAGCCATTCAAG | | | | | | Universal |
| 3813 | cg02042055 | GCTGTTTGATCGAGGTGTTCAAATGCTTTTAACCACCGTTGGTGCTTTCG | | | | | | Universal |
| 3814 | cg01990759 | AGATGGACGACAGCCATTGCTCGTCCTCCATGAAATTGCCGGGGGTCTCG | | | | | | Universal |
| 3815 | cg21871906 | TCCACCTTTGTAACCCCTGGTTTCCTCTTTTCCTGAATCACAAATTTACG | | | | | | Universal |
| 3816 | cg05736341 | CGGATGGGAACTGTCAGAGCCTGCCATCTGTGACAGCGCTTGGCATATTC | | | | | | Universal |
| 3817 | cg00817637 | GGGCCGCTGCTGGATAATTTGCAGTTTAATCAGCGTTTGTAATGAGAGCG | | | | | | Universal |
| 3818 | cg00900456 | TTCACAAGCCAGCAGTTGCAAGAGCTAGAGGCCACGTTCCAGAGGAACCG | | | | | | Universal |
| 3819 | cg01036016 | CGTGTGAAAATGAACAAACGCAAGCGTAGCACAGTTAATGAAAAGCCAAA | | | | | | Universal |
| 3820 | cg03225070 | GGGCTTCAGATATTTTGCACGAATTTTAAAACATGGCAATAAATGGCTCG | | | | | | Universal |
| 3821 | cg03856216 | CGGCTAAAGTCTCTCCAAGGTGACAAGCTGGAAGTCAGCTTGGTAAGTGT | | | | | | Universal |
| 3822 | cg04363039 | TTAAAAAAATCAACTAAACCATGCTTTTCAGAACAGAAGATTCATTATCG | | | | | | Universal |
| 3823 | cg06679388 | CGTCATCAGGCCTGGCAGAGCTCATTGGCAGAGAAGTTAAGAGTTTTATT | | | | | | Universal |
| 3824 | cg18974733 | CGTGCAGTTTGCTTCAAAGGAGATAGCAGAAAATGCTCTGGGGAAACACA | | | | | | Universal |
| 3825 | cg19275555 | CTTTAATGAAAACTGCAAGCACCAAAGGGTAACCATTTATTTATGAGTCG | | | | | | Universal |
| 3826 | cg11252613 | CGGCACATTTAACATGGTTAAAGCAGGGGAAAATAGTCATTAAGTTAATG | | | | | | Universal |
| 3827 | cg23869573 | CGGTATATACTAGCCTGCAATGAAGAAAGAACGAGACCCACATCATCAGC | | | | | | Universal |
| 3828 | cg05866252 | CAATCTCGCGGTGACTGATTAAGCCCTGTTTAGAACTAATTGCTCTTTCG | | | | | | Universal |
| 3829 | cg06244551 | CGTCGATACAATCACCAATGAGTCGATCCACAGGTACCGGGAACATAGAA | | | | | | Universal |
| 3830 | cg06413694 | TAGCTCCCTAATTAACTGTCTCAAATATATAATTACATTGCATCTTTACG | | | | | | Universal |
| 3831 | cg16764258 | ATGGTGGCGTACGCCCTTGTAATGATCAGCTCTGGTCGATGTGCTTACCG | | | | | | Universal |
| 3832 | cg25323457 | CGGCACTGCTATTTATAACTCATCTCAAATTGAGGGCAGACTGCCTAAAA | | | | | | Universal |
| 3833 | cg01772613 | CGCGAACTGTGCAAGCAAAGCCCCACATGGCTTTATCAGGAGTGTTGTGT | | | | | | Universal |
| 3834 | cg27245416 | GAGGTATTCATACTGGGCTGATACCCAGGGTTTGGAGTCATGGAATTCCG | | | | | | Universal |
| 3835 | cg01209550 | GTTAGCATTTTACGAGTTCTTTCCTCTACAGCTATAAAACTGCAGCTTCG | | | | | | Universal |
| 3836 | cg21883915 | CGGGAACGCTTACAGAGAGAGAGAGAGCGCCTAGAAATTGAAAGGCAAAA | | | | | | Universal |
| 3837 | cg02553697 | CGGATACTCAACAGTCCACTATCGGAGAGGGCTGTCAGATAAATCTTGTG | | | | | | Universal |
| 3838 | cg02658193 | TACCCGGAAGAGAACCCTTGGCCTTCTCAGCTGGGAGCTGGGAGCACACG | | | | | | Universal |
| 3839 | cg04577801 | GAACAAACATATAAATATATCTCTGCATTCCTGCCTCCCTCATAAAAGCG | | | | | | Universal |
| 3840 | cg22825729 | TGTAGTGCTGCGGTTTCTCGGGCTGTGCCTGCAGCACCTGAGCGGTAGCG | | | | | | Universal |
| 3841 | cg23059642 | AGGACATCATTGATGGATTTGCCATGACCAGCTTTGTCACTTTTGAAGCG | | | | | | Universal |
| 3842 | cg23126309 | ATCTTCCTAATTTTTCATCTCTTTAACAAACTCCTATGAAGTTGAAACCG | | | | | | Universal |
| 3843 | cg24638399 | TTCCTTTTGCCTCGTGCAATCCGTAATTGAAATGGAAAATCAAATGAACG | | | | | | Universal |
| 3844 | cg17417202 | CGCTTAGCAGCTATTATGTCGACTCGATCATAAGTCACGAGAGTGAGGAC | | | | | | Universal |
| 3845 | cg17542246 | CGCCTCTGCTGGAACAAGCAGGACCCTAACTACCTGGCCACCATGGCCAT | | | | | | Universal |
| 3846 | cg17554167 | CGATGTTGAATTTTAAAATCATGTGGATTATGGCGGATGGGGCCTGACAA | | | | | | Universal |
| 3847 | cg17942396 | AACAATTATTATTATAATTTTAAACAACCTGGTATTTTCCATTACTAACG | | | | | | Universal |
| 3848 | cg20453574 | CGGCAGGTTTAGTGGCATGGCAAACAATGCCTAACTCAGGCAAGTGTAAC | | | | | | Universal |
| 3849 | cg21482536 | AGCTGCTCTCGGCACAAGCATGTACGGCAAAGGCAAGAGTAACAGCAGCG | | | | | | Universal |
| 3850 | cg23320654 | CGCAGATAGCTGGGTTGCTTGATTTGAATTTGAGGAGTTGAAAAGCCTGT | | | | | | Universal |
| 3851 | cg07388493 | TCTTTCTCTCCTGTGACTTTGGTGAAGTCTCTCACCACTCAGTGTTGTCG | | | | | | Universal |
| 3852 | cg13294690 | AGCAATTCATCCCCGATCTCATCACAAAGTAACAGCGACCATCCTGCTCG | | | | | | Universal |
| 3853 | cg13943045 | CGTATAGTTGTACACTGGACAAATCTCCTGCAGAGCAACAAGATTTCCTA | | | | | | Universal |
| 3854 | cg15425194 | GGCCTGGGGAATAGAAACCCAAATCCACTTGTAATCGTACAAGAGATTCG | | | | | | Universal |
| 3855 | cg07987507 | CTTTTACAAACTAGTTGTTTTGTCAGCATGAGTGTGACAACAATTAGACG | | | | | | Universal |
| 3856 | cg18987683 | CGAGAAACTGGACAACCAACGGCTCAAGAATTTCAAGAACAAAGGCCGCG | | | | | | Universal |
| 3857 | cg08212459 | CGCCAGATTAGCCCCATCCATCCAGTGTCAATGGTTGTCTTGTTGAGAAA | | | | | | Universal |
| 3858 | cg08662919 | CGTGGGGTGGTTCCTATTTCTGTCGGCAAATACAAATTTTTCACTCAGCA | | | | | | Universal |
| 3859 | cg04080945 | CGGCACTCAGTACATTAATTCACGCTGAAGTCCGGTAAATCAAAATTATA | | | | | | Universal |
| 3860 | cg03626038 | CATTGTCCAAGTGGAGTGCCATTTCTTCTGATATGAAAGTGTTCAAATCG | | | | | | Universal |
| 3861 | cg06197482 | TTCTTAGCCCCGCTCCCATGTGAGGCCTAAACAAAGACTTTGGGGAGACG | | | | | | Universal |
| 3862 | cg06459870 | CGTCGTTGGCTAGGTTTTGGATTTATTACTTTCGAGGACGAACAATCAGT | | | | | | Universal |
| 3863 | cg20140365 | CGAGACATTCAGTGCTTTTTAAATTGGAAGTTGCATTGTGCTAAAGACCT | | | | | | Universal |
| 3864 | cg22063749 | GCATTTTAGCTAAACTAAGACTTGCCCTGCATGGTGCCAGCTGTAGCACG | | | | | | Universal |
| 3865 | cg22414596 | ATTAATGGCTTTTCTCAGCGGAATTGTAAATTCAAATGTCACCTCACACG | | | | | | Universal |
| 3866 | cg22667099 | CTATCTCTTGTTCTGAATAGAACCAATTTTCAGAGAGCTATGAAATCACG | | | | | | Universal |
| 3867 | cg01759800 | CGGAGAGCAGGGAAGGCTAAAGCCGGAGCCTAATTCATGATGCATGAACG | | | | | | Universal |
| 3868 | cg18221275 | GTTTGTCATCGTACCAATGCATGCAAAGCATTCCACTCCCAGAAACAACG | | | | | | Universal |
| 3869 | cg13581054 | CGGCACATTAGGCAGTGCGCTTATTTTGGGCTCCGCTTCAGTGGATTAAC | | | | | | Universal |
| 3870 | cg13705955 | TGAGGCCAGACAGTAGAGGCAGGTTATAGATCACAGCACATGGAGAAGCG | | | | | | Universal |
| 3871 | cg14258341 | TTGACTCCTTTCAGTTGATAATTCATGGCTTGCATATGCGCTTTAATGCG | | | | | | Universal |
| 3872 | cg00292639 | ACACACAGCAGGAAGGCAAACATCAGCTTGTGCTTCTCAAAGAGGCTGCG | | | | | | Universal |
| 3873 | cg15546160 | CGGAAATTGCATAGTAGACCTCGTAAACTTTATAAACATTCAAGGTAGGT | | | | | | Universal |
| 3874 | cg12967137 | CGGGGTGCACCGAGCTGTCGGGTTAAACAAACAACTTGTACCCTGACCAA | | | | | | Universal |
| 3875 | cg13313332 | GCTACAGTAAGTTATTCCAATTTTTTTTTAACATTTTTCCTGACTTTCCG | | | | | | Universal |
| 3876 | cg14006844 | CGGCTTCATCCTGCGCCAGTTCAACGCCTGCCCCTGGGACTACTCCCAGT | | | | | | Universal |
| 3877 | cg04228573 | CGCCCTTCGCAGGAAGGACGTCTGCGCACTAAGATACTCAGTTCCAAGTT | | | | | | Universal |
| 3878 | cg04404159 | CGAAAGTTAAGTCTTCGTGGATGTCTTGGAGTGGGAGACAATGCATTAAG | | | | | | Universal |
| 3879 | cg06493080 | CTCTAATTCTGTAATATATCAAGGAATCTCGTAAAACCGACACTAAAACG | | | | | | Universal |
| 3880 | cg09161688 | CGTGTTTGGAATTGTTGTGCACAAACATGTTGTCTGACACGGCCAGCACG | | | | | | Universal |

### CONCLUSION

[0388] This concludes the description of the preferred embodiment of the present invention. The foregoing description of one or more embodiments of the invention has been presented for the purposes of illustration and description. It is not intended to be exhaustive or to limit the invention to the precise form disclosed. Many modifications and variations are possible in light of the above teaching.

1. A method for obtaining information associated with an age of a mammal, the method comprising:
obtaining genomic DNA from the mammal;
observing CpG methylation of the genomic DNA in a group of at least 40 methylation markers present in genomic polynucleotides having SEQ ID NO: 1-SEQ ID NO: 3880; and
correlating methylation observed in the methylation markers with an age of the mammal; so that information associated with an age of the mammal is obtained.

2. The method of claim 1, wherein:
methylation of the genomic DNA is observed in a plurality of methylation markers present in in polynucleotides having SEQ ID NO: 1-SEQ ID NO: 956 such that the methylation markers observed are selected to be methylation markers whose methylation status is associated with an age in both humans and dogs.

3. The method of claim 1, wherein:
methylation of the genomic DNA is observed in a plurality of methylation markers present in in polynucleotides having SEQ ID NO: 2220-SEQ ID NO: 3043 such that methylation markers observed are selected to be methylation markers whose methylation status is associated with an age in both humans and rats.

4. The method of claim 1, wherein:
methylation of the genomic DNA is observed in a plurality of methylation markers present in in polynucleotides having SEQ ID NO: 1222-SEQ ID NO: 2219 such that methylation markers observed are selected to be methylation markers whose methylation status is associated with an age in both humans and mice.

5. The method of claim 1, wherein:
methylation of the genomic DNA is observed in a plurality of methylation markers present in in polynucleotides having SEQ ID NO: 3044-SEQ ID NO: 3880 such that methylation markers observed are selected to be methylation markers whose methylation status is associated with an age in a plurality of mammalian species.

6. The method of claim 1, wherein the method comprises correlating methylation observed in the methylation markers with an epigenetic age and/or a chronological age of the mammal.

7. The method of claim 6, wherein the method further compares an epigenetic age obtained for the sample with the chronological age of the mammal.

8. The method of claim 1, wherein the method comprises determining an epigenetic age of the biological sample with a statistical prediction algorithm, comprising (a) obtaining a linear combination of the methylation marker levels, and (b) applying a transformation to the linear combination to determine an epigenetic age of the biological sample.

9. The method of claim 1, wherein:
methylation is observed by a process comprising treatment of genomic DNA from the population of cells from the individual with bisulfite to transform unmethylated cytosines of CpG dinucleotides in the genomic DNA to uracil;
genomic DNA is obtained from fibroblasts, keratinocytes, buccal cells, endothelial cells, lymphoblastoid cells, and/or cells obtained from blood, skin, dermis, epidermis or saliva;
genomic DNA is hybridized to a complimentary sequence disposed on a microarray; and/or
correlating observed methylation in the methylation markers comprises a regression analysis.

10. A method of observing the effects of an environmental condition on genomic methylation associated epigenetic aging of mammalian cells, the method comprising:
(a) exposing mammalian cells to the environmental condition;
(b) observing methylation status in at least 40 of the methylation markers present in polynucleotides having SEQ ID NO: 1-SEQ ID NO: 3880 in genomic DNA from the mammalian cells;
(c) comparing the observations from (b) with observations of a methylation status at least 40 of the methylation markers present in in polynucleotides having SEQ ID NO: 1-SEQ ID NO: 3880 in genomic DNA from control mammalian cells not exposed to the environmental condition such that effects of the environmental condition on genomic methylation associated epigenetic aging in the mammalian cells is observed.

11. The method of claim 10, wherein:
the plurality of the methylation markers observed are selected to be methylation markers whose methylation status is associated with age in both humans and dogs, and/or
the cells are human and/or dog cells.

12. The method of claim 10, wherein:
the plurality of the methylation markers observed are selected to be methylation markers whose methylation status is associated with age in both humans and rats; and/or
the cells are human and/or rat cells.

13. The method of claim 10, wherein:
the plurality of the methylation markers observed are selected to be methylation markers whose methylation status is associated with age in both humans and mice; and/or
the cells are human and/or mouse cells.

14. The method of claim 10, wherein:
a plurality of the methylation markers observed are selected to be methylation markers whose methylation status is associated with an age in a plurality of mammalian species and
the cells are human cells.

15. The method of claim 10, wherein:
methylation is observed by a process comprising treatment of genomic DNA from the population of cells from the individual with bisulfite to transform unmethylated cytosines of CpG dinucleotides in the genomic DNA to uracil;
genomic DNA is obtained from fibroblasts, keratinocytes, buccal cells, endothelial cells, lymphoblastoid cells, and/or cells obtained from blood, skin, dermis, epidermis or saliva;
genomic DNA is hybridized to a complimentary sequence disposed on a microarray; and/or
correlating observed methylation in the methylation markers comprises a regression analysis.

16. The method of claim 10, wherein the environmental condition comprises exposure to a composition of matter.

17. The method of claim 16, wherein the composition of matter is combined with mammalian cells for at least 1 day, at least 1 week or at least 1 month.

18. The method of claim 17, wherein the composition of matter comprises a test agent having a molecular weight of <900 Da.

19. A tangible computer-readable medium comprising computer-readable code that, when executed by a computer, causes the computer to perform operations comprising:
a) receiving information corresponding to a methylation status of a set of methylation markers in a biological sample, said methylation markers comprising methylation markers present in genomic polynucleotides having SEQ ID NO: 1-SEQ ID NO: 3880; and
b) determining an age of the biological sample by applying a statistical prediction algorithm to the measured methylation marker levels.

20. The tangible computer-readable medium of claim 19, further comprising computer-readable code that, when executed by a computer, causes the computer to perform one or more additional operations comprising: sending information corresponding to the methylation levels of the set of methylation markers in the biological sample to a tangible data storage device.

The application's sequence listing, which the Patent Office published only in electronic form, follows.

SEQUENCE LISTING (3880 sequences)

SEQ ID NO: 1 - DNA, 50 bp, Unknown
  Description of Unknown: Dog/Cat/Mouse/Rat/Human/Universal CpG sequence
cgccttcaaggcggccgccttcttcgtgctgctctccatggtgctgatcc

SEQ ID NO: 2 - DNA, 50 bp, Unknown
  Description of Unknown: Dog/Cat/Mouse/Rat/Human/Universal CpG sequence
cgctgaagttggcttcctagcggtgtaggctggaatagactcttggcaag

SEQ ID NO: 3 - DNA, 50 bp, Unknown
  Description of Unknown: Dog/Cat/Mouse/Rat/Human/Universal CpG sequence
cggataaatacacttaaacgaggatttagttttactcctgttgagttcta

SEQ ID NO: 4 - DNA, 50 bp, Unknown
  Description of Unknown: Dog/Cat/Mouse/Rat/Human/Universal CpG sequence
cgccctttggtgatataaaatgcaatattttcaggcagctattgagcttt

SEQ ID NO: 5 - DNA, 50 bp, Unknown
  Description of Unknown: Dog/Cat/Mouse/Rat/Human/Universal CpG sequence
aggtttaatgccataaggccggctggagggcaagcccgcgaaggagagcg

SEQ ID NO: 6 - DNA, 50 bp, Unknown
  Description of Unknown: Dog/Cat/Mouse/Rat/Human/Universal CpG sequence
cgccccttggagttctccagttctgtgaatggtgtgcaccgttttccgcc

SEQ ID NO: 7 - DNA, 50 bp, Unknown
  Description of Unknown: Dog/Cat/Mouse/Rat/Human/Universal CpG sequence
agcaccagtacaggtcggtgacggcgatgaggtacaggtccagcaggccg

SEQ ID NO: 8 - DNA, 50 bp, Unknown
  Description of Unknown: Dog/Cat/Mouse/Rat/Human/Universal CpG sequence
gctgaaaataccttgacacccaatccgagaggtttgctcatttcccttcg

SEQ ID NO: 9 - DNA, 50 bp, Unknown
  Description of Unknown: Dog/Cat/Mouse/Rat/Human/Universal CpG sequence
agtcagctaaatgaaacattattctaaacatatgcatcgtaatcagttcg

SEQ ID NO: 10 - DNA, 50 bp, Unknown
  Description of Unknown: Dog/Cat/Mouse/Rat/Human/Universal CpG sequence
cgcggcaggactcgaacctgcaatcttctgatccgaagtcagacgcctta

SEQ ID NO: 11 - DNA, 50 bp, Unknown
  Description of Unknown: Dog/Cat/Mouse/Rat/Human/Universal CpG sequence
gagtgacgtcaggagcagaggccggagctgtccatcagcaccaaaggccg

SEQ ID NO: 12 - DNA, 50 bp, Unknown
  Description of Unknown: Dog/Cat/Mouse/Rat/Human/Universal CpG sequence
cgcgacctcacaagtcaagcgccttgtttggattagccctccagatctgc

SEQ ID NO: 13 - DNA, 50 bp, Unknown
  Description of Unknown: Dog/Cat/Mouse/Rat/Human/Universal CpG sequence
gcgacagatgggccactttcttctggccacaaaggggccggaatggagcg

SEQ ID NO: 14 - DNA, 50 bp, Unknown
  Description of Unknown: Dog/Cat/Mouse/Rat/Human CpG sequence
cggccactcataaatttggcttgatgacctccgggaggttagtgatggaa

SEQ ID NO: 15 - DNA, 50 bp, Unknown
  Description of Unknown: Dog/Cat/Mouse/Rat/Human CpG sequence
tgcacgggctacgtcagaatttacggatcctgactccaggaaggcatgcg

SEQ ID NO: 16 - DNA, 50 bp, Unknown
  Description of Unknown: Dog/Cat/Mouse/Rat/Human CpG sequence
tgcatcattcctgttctgttacgggaaacaggcaatgtctgagactttcg

SEQ ID NO: 17 - DNA, 50 bp, Unknown
  Description of Unknown: Dog/Cat/Mouse/Rat/Human CpG sequence
cgggcagctacttcccctacaagcacagctacatgtggagcctcaggtgg

SEQ ID NO: 18 - DNA, 50 bp, Unknown
  Description of Unknown: Dog/Cat/Mouse/Rat/Human CpG sequence
cgccctggggaaaagtgactcctcatacatattactttagcctaatggcc

SEQ ID NO: 19 - DNA, 50 bp, Unknown
  Description of Unknown: Dog/Cat/Mouse/Rat/Human CpG sequence
gaattgtgtgaattatcccagctcaattctttaagttagtcagaggtacg

SEQ ID NO: 20 - DNA, 50 bp, Unknown
  Description of Unknown: Dog/Cat/Mouse/Rat/Human CpG sequence
tatttatgcaaaagtgagccgactttgttcgccaggtaaccgggcacgcg

SEQ ID NO: 21 - DNA, 50 bp, Unknown
  Description of Unknown: Dog/Cat/Mouse/Rat/Human CpG sequence
cggaggcacagtcagtatggtgctgtgtgcttgttgttttgttttggttt

SEQ ID NO: 22 - DNA, 50 bp, Unknown
  Description of Unknown: Dog/Cat/Mouse/Rat/Human CpG sequence
acactgctcctgagaactgtcggaaacaatgtctgtggtcggaggtgacg

SEQ ID NO: 23 - DNA, 50 bp, Unknown
  Description of Unknown: Dog/Cat/Mouse/Rat/Human CpG sequence
ctcgagtgcaaggtgtgctttgagaagtttggccaccggcagcagcggcg

SEQ ID NO: 24 - DNA, 50 bp, Unknown
  Description of Unknown: Dog/Cat/Mouse/Rat/Human CpG sequence
cgcacaattttattgattgaagagattaggacaaaaacattaaaccaaat

SEQ ID NO: 25 - DNA, 50 bp, Unknown
  Description of Unknown: Dog/Cat/Mouse/Rat/Human CpG sequence
catcacaagaaatgtatgcactggaaacttacaagcttgctcaagatgcg

SEQ ID NO: 26 - DNA, 50 bp, Unknown
  Description of Unknown: Dog/Cat/Mouse/Rat/Human CpG sequence
aaaatgaaaaattttgtgttgttgcgttccctctcactcactccccctcg

SEQ ID NO: 27 - DNA, 50 bp, Unknown
  Description of Unknown: Dog/Cat/Mouse/Human/Universal CpG sequence
cgccatcatcaacgtggtggtcttcatccagccctactgggtgggcgaca

SEQ ID NO: 28 - DNA, 50 bp, Unknown
  Description of Unknown: Dog/Cat/Mouse/Human/Universal CpG sequence
ggccacgctttattaaattctcataaacctgtcaggggggacagggctcg

SEQ ID NO: 29 - DNA, 50 bp, Unknown
  Description of Unknown: Dog/Cat/Mouse/Human/Universal CpG sequence
aactggacagcaccatgtccaccaaagcggagcagtgtaagtagcagccg

SEQ ID NO: 30 - DNA, 50 bp, Unknown
  Description of Unknown: Dog/Cat/Mouse/Human/Universal CpG sequence
cgcaagaggcatttttgcaaataccatgcaaaacaggcagctggtgtgcc

SEQ ID NO: 31 - DNA, 50 bp, Unknown
  Description of Unknown: Dog/Cat/Mouse/Human CpG sequence
gcagccccagtagcacgaggaggtgttgcagcagtggcagatgtgcatcg

SEQ ID NO: 32 - DNA, 50 bp, Unknown
  Description of Unknown: Dog/Cat/Mouse/Human CpG sequence
ttggtcatgttctgcagcagcgactgcagctcctgcgtgttgcccttgcg

SEQ ID NO: 33 - DNA, 50 bp, Unknown
  Description of Unknown: Dog/Cat/Mouse/Human CpG sequence
gaatatccccagtgttctcatcaataatgaaaatggaacttgccccttcg

SEQ ID NO: 34 - DNA, 50 bp, Unknown
  Description of Unknown: Dog/Cat/Mouse/Human CpG sequence
cgcctacttgtcttaattgatccacgccttatggtctgagctttcagttt

SEQ ID NO: 35 - DNA, 50 bp, Unknown
  Description of Unknown: Dog/Cat/Mouse/Human CpG sequence
cttgaggacaaacgtaaccaagacgaccaattgttattgctaaggtaacg

SEQ ID NO: 36 - DNA, 50 bp, Unknown
  Description of Unknown: Dog/Cat/Mouse/Human CpG sequence
taactgtataatttataataattgatttcattttgactgaccaccagtcg

SEQ ID NO: 37 - DNA, 50 bp, Unknown
  Description of Unknown: Dog/Cat/Mouse/Human CpG sequence
cgcaaaaactattttaagactttctgaactttgaccagatgttgacactt

SEQ ID NO: 38 - DNA, 50 bp, Unknown
  Description of Unknown: Dog/Cat/Rat/Human/Universal CpG sequence
cagccagtcctccaggttcaataggagatggctggccacgtgccaaatcg

SEQ ID NO: 39 - DNA, 50 bp, Unknown
  Description of Unknown: Dog/Cat/Rat/Human/Universal CpG sequence
cgtggctctatctggatcacaatcacatctgctccgtgcagggggacgcc

SEQ ID NO: 40 - DNA, 50 bp, Unknown
  Description of Unknown: Dog/Cat/Rat/Human/Universal CpG sequence
gaggagatccgcttctaccagctgggcgaggaggccatggagaagttccg

SEQ ID NO: 41 - DNA, 50 bp, Unknown
  Description of Unknown: Dog/Cat/Rat/Human/Universal CpG sequence
cgtctgtggcatggtttgcattgggcccaatgtgcttatggtacataaaa

SEQ ID NO: 42 - DNA, 50 bp, Unknown
  Description of Unknown: Dog/Cat/Rat/Human/Universal CpG sequence
caatctgctctgaatatatattacagctttaacatcacagagggaaatcg

SEQ ID NO: 43 - DNA, 50 bp, Unknown
  Description of Unknown: Dog/Cat/Rat/Human/Universal CpG sequence
ataacattggatttgccactgccatttggcccgataatacaggaaaagcg

SEQ ID NO: 44 - DNA, 50 bp, Unknown
  Description of Unknown: Dog/Cat/Rat/Human/Universal CpG sequence
cgcagaatttataccatcatgtcagcagaggaggtagccaatgggaaaaa

SEQ ID NO: 45 - DNA, 50 bp, Unknown
  Description of Unknown: Dog/Cat/Rat/Human/Universal CpG sequence
ttcgccccttggagttctccagttctgtgaatggtgtgcaccgttttccg

SEQ ID NO: 46 - DNA, 50 bp, Unknown
  Description of Unknown: Dog/Cat/Rat/Human/Universal CpG sequence
gagcctacctgacattttggagaatttgctgtgctgggattgatattccg

SEQ ID NO: 47 - DNA, 50 bp, Unknown
  Description of Unknown: Dog/Cat/Rat/Human/Universal CpG sequence
tccttcttccccgtaaaactttgtccaagtacctcatgtacggtaatccg

SEQ ID NO: 48 - DNA, 50 bp, Unknown
  Description of Unknown: Dog/Cat/Rat/Human CpG sequence
gcaggtacacgaaggccatgatgcacaggggcacgtagaaggagactacg

SEQ ID NO: 49 - DNA, 50 bp, Unknown
  Description of Unknown: Dog/Cat/Rat/Human CpG sequence
ttacccattctcgctcgtaaatccagttcaattgtgctaacccagagtcg

SEQ ID NO: 50 - DNA, 50 bp, Unknown
  Description of Unknown: Dog/Cat/Rat/Human CpG sequence
cggtgtgttttgattattttttacatgtgcctactgacttccgacatgag

SEQ ID NO: 51 - DNA, 50 bp, Unknown
  Description of Unknown: Dog/Cat/Rat/Human CpG sequence
aacggctcaataaaagtattcagaatccctctcaagttgccttttaaccg

SEQ ID NO: 52 - DNA, 50 bp, Unknown
  Description of Unknown: Dog/Cat/Rat/Human CpG sequence
aatttgtttgctgccttttcaatttgccattcagtttccatggtttcacg

SEQ ID NO: 53 - DNA, 50 bp, Unknown
  Description of Unknown: Dog/Cat/Rat/Human CpG sequence
aattttctcttcacctcatattattaaaagtaataagtttttctggaccg

SEQ ID NO: 54 - DNA, 50 bp, Unknown
  Description of Unknown: Dog/Cat/Rat/Human CpG sequence
cgggcaatttaattactgttggtaaaataagaaatgaatgattgcatatc

SEQ ID NO: 55 - DNA, 50 bp, Unknown
  Description of Unknown: Dog/Cat/Rat/Human CpG sequence
cggattctccatttgcttttatattggaaaaatatgtgctgtgccaatga

SEQ ID NO: 56 - DNA, 50 bp, Unknown
  Description of Unknown: Dog/Cat/Rat/Human CpG sequence
cggcagaaaattggcaaggcttaataaacctcatgcctgacgcactcctg

SEQ ID NO: 57 - DNA, 50 bp, Unknown
  Description of Unknown: Dog/Cat/Rat/Human CpG sequence
cgctccattttatggaaacaagctctgcggagagggctttgatgctctaa

SEQ ID NO: 58 - DNA, 50 bp, Unknown
  Description of Unknown: Dog/Cat/Rat/Human CpG sequence
cgcccagcgaggacatctggaagaaattcgagctggtgccatcgcccccc

SEQ ID NO: 59 - DNA, 50 bp, Unknown
  Description of Unknown: Dog/Cat/Rat/Human CpG sequence
cggtccccagccccctgctcagctcagcctcggccaggaacgccatgtta

SEQ ID NO: 60 - DNA, 50 bp, Unknown
  Description of Unknown: Dog/Cat/Rat/Human CpG sequence
cgctctcttgacagctcgattgcgtgctgcctctgctcctgcataaatca

SEQ ID NO: 61 - DNA, 50 bp, Unknown
  Description of Unknown: Dog/Cat/Rat/Human CpG sequence
ggtggtagtcgtcgtatctggggtggtaaagaagcccaaggtcacacgcg

SEQ ID NO: 62 - DNA, 50 bp, Unknown
  Description of Unknown: Dog/Cat/Rat/Human CpG sequence
tgctggctctgaagccgtgtagaatttcgtaatggaatgtgaactgctcg

SEQ ID NO: 63 - DNA, 50 bp, Unknown
  Description of Unknown: Dog/Cat/Rat/Human CpG sequence
cggcaccatgaccctgggcagctgctgctgcgagatcatgtcctccgaga

SEQ ID NO: 64 - DNA, 50 bp, Unknown
  Description of Unknown: Dog/Cat/Rat/Human CpG sequence
ctgtgaccgctggctggatggggtaggcctgctgcacaaaaggcttgacg

SEQ ID NO: 65 - DNA, 50 bp, Unknown
  Description of Unknown: Dog/Cat/Rat/Human CpG sequence
cggctccccgtgaccttattcaatcttggggctgatcgggaaatatattg

SEQ ID NO: 66 - DNA, 50 bp, Unknown
  Description of Unknown: Dog/Cat/Rat/Human CpG sequence
caggcagctgaccctgaatgagatctataactggttcaccaggatgttcg

SEQ ID NO: 67 - DNA, 50 bp, Unknown
  Description of Unknown: Dog/Cat/Rat/Human CpG sequence
cgcggatgtggttaaccagtttgtatttggctttgaagggcttgccctcg

SEQ ID NO: 68 - DNA, 50 bp, Unknown
  Description of Unknown: Dog/Cat/Rat/Human CpG sequence
cggcttccgaatggtaaactgaaatgtgacgtctgtggcatggtttgcat

SEQ ID NO: 69 - DNA, 50 bp, Unknown
  Description of Unknown: Dog/Cat/Rat/Human CpG sequence
tctttaccagaattttcagccagccgtaactttccacaacaaagataccg

SEQ ID NO: 70 - DNA, 50 bp, Unknown
  Description of Unknown: Dog/Cat/Rat/Human CpG sequence
gcttcttgcccagggagccgctgcagttgtactgcttgcgcaggttctcg

SEQ ID NO: 71 - DNA, 50 bp, Unknown
  Description of Unknown: Dog/Cat/Rat/Human CpG sequence
cgcaccaaccaaagacaacatattgggaagaaaaatgcttgtaaactgca

SEQ ID NO: 72 - DNA, 50 bp, Unknown
  Description of Unknown: Dog/Cat/Rat/Human CpG sequence
cgcaggagccttcacggagcagattctgagggacatggcctccttccacg

SEQ ID NO: 73 - DNA, 50 bp, Unknown
  Description of Unknown: Dog/Cat/Rat/Human CpG sequence
cgtcgagaagtatagacctgcctccgcctcagtatcggctctgattggag

SEQ ID NO: 74 - DNA, 50 bp, Unknown
  Description of Unknown: Dog/Cat/Rat/Human CpG sequence
cgctgagagaagacataatcaattccccagctggcactttgcgctgaata

SEQ ID NO: 75 - DNA, 50 bp, Unknown
  Description of Unknown: Dog/Cat/Rat/Human CpG sequence
cgcgttaactcggctggaacgctggttaatttaacagcaggagttgaatt

SEQ ID NO: 76 - DNA, 50 bp, Unknown
  Description of Unknown: Dog/Cat/Rat/Human CpG sequence
aaggtgacagccaagccgcgttagcacctgcataaaatattaaagggacg

SEQ ID NO: 77 - DNA, 50 bp, Unknown
  Description of Unknown: Dog/Cat/Rat/Human CpG sequence
cgctcagttcagctttaattatgactctgcagacctgaagaaatattgca

SEQ ID NO: 78 - DNA, 50 bp, Unknown
  Description of Unknown: Dog/Cat/Rat/Human CpG sequence
cccggcgcttaaatctgtggcttaatccttttgcaaatatgcattgatcg

SEQ ID NO: 79 - DNA, 50 bp, Unknown
  Description of Unknown: Dog/Cat/Rat/Human CpG sequence
ttctaatgttccattgtgaggagcttccattgtgacgtcgcgccccttcg

SEQ ID NO: 80 - DNA, 50 bp, Unknown
  Description of Unknown: Dog/Cat/Rat/Human CpG sequence
gatctgttcatctccgctcttcctcgactcttctctcttcttgtcttacg

SEQ ID NO: 81 - DNA, 50 bp, Unknown
  Description of Unknown: Dog/Cat/Rat/Human CpG sequence
cgccccctacctgggtgcaacatactttggaaatagaagatgaccaggat

SEQ ID NO: 82 - DNA, 50 bp, Unknown
  Description of Unknown: Dog/Cat/Human/Universal CpG sequence
aagaccccagtggcgctgttttaaaaagcccccaagaagtgaagagcgcg

SEQ ID NO: 83 - DNA, 50 bp, Unknown
  Description of Unknown: Dog/Cat/Human/Universal CpG sequence
cgatggctttcctgaatggctgactgtgggctgccctggacttggccccc

SEQ ID NO: 84 - DNA, 50 bp, Unknown
  Description of Unknown: Dog/Cat/Human CpG sequence
gggctcagaagccagttgttggcgctgtccgtggtgctgaggaattcccg

SEQ ID NO: 85 - DNA, 50 bp, Unknown
  Description of Unknown: Dog/Cat/Human CpG sequence
cgccggatgctaatgatgaaatcaaaatgtcatccaagttaaatgcgggg

SEQ ID NO: 86 - DNA, 50 bp, Unknown
  Description of Unknown: Dog/Cat/Human CpG sequence
actgtacagcccataaaactccaaacagcctccagacactgccgcaatcg

SEQ ID NO: 87 - DNA, 50 bp, Unknown
  Description of Unknown: Dog/Cat/Human CpG sequence
cgagcatattttgtagcttctcttcgccagtgggaagccaccagcaaacc

SEQ ID NO: 88 - DNA, 50 bp, Unknown
  Description of Unknown: Dog/Cat/Human CpG sequence
cgggcagtggggccagtgtctttatcggccagatggtgtgaatttagaca

SEQ ID NO: 89 - DNA, 50 bp, Unknown
  Description of Unknown: Dog/Cat/Human CpG sequence
cgcggagcgctccattccggcccctttgtggccagaagaaagtggcccat

SEQ ID NO: 90 - DNA, 50 bp, Unknown
  Description of Unknown: Dog/Cat/Human CpG sequence
agtcaccagggtggaatattttagcacctatagaaaaaccgccacagacg

SEQ ID NO: 91 - DNA, 50 bp, Unknown
  Description of Unknown: Dog/Cat/Human CpG sequence
ctctccccgggccgtggaaaggatcccacttccggtggggtgtcatggcg

SEQ ID NO: 92 - DNA, 50 bp, Unknown
  Description of Unknown: Dog/Cat/Human CpG sequence
tgggggctggggtccctggtcactatggggagagtgcagcaggacctgcg

SEQ ID NO: 93 - DNA, 50 bp, Unknown
  Description of Unknown: Dog/Cat/Human CpG sequence
cggcctgtgtgagcaaagggaaggaaatgacacaggcaggaaaaaaaagc

SEQ ID NO: 94 - DNA, 50 bp, Unknown
  Description of Unknown: Dog/Cat/Human CpG sequence
acttccgggatcggaaactgtactgcaaacaagactaccaacagtaagcg

SEQ ID NO: 95 - DNA, 50 bp, Unknown
  Description of Unknown: Dog/Cat/Human CpG sequence
cgcagcaagtcagatatggcttttttatataatgctaatcaagtttccaa

SEQ ID NO: 96 - DNA, 50 bp, Unknown
  Description of Unknown: Dog/Cat/Human CpG sequence
cgctcgcatttaaggcataattgatttttattgaaaagccagcaggcaca

SEQ ID NO: 97 - DNA, 50 bp, Unknown
  Description of Unknown: Dog/Cat/Human CpG sequence
cgaggaccacctggcagttcataaacacaagcatgagatgacattgaaat

SEQ ID NO: 98 - DNA, 50 bp, Unknown
  Description of Unknown: Dog/Cat/Human CpG sequence
cggcaccaaacagctgtaaattgaaggttgtgcttagttttctcaactct

SEQ ID NO: 99 - DNA, 50 bp, Unknown
  Description of Unknown: Dog/Cat/Human CpG sequence
cgcaccgcactccatatcgaggatggattgttttatgctgatgcaatgtg

SEQ ID NO: 100 - DNA, 50 bp, Unknown
  Description of Unknown: Dog/Cat/Human CpG sequence
cgttgccgtcttgaagattcagtagaactacatcccaggcatgtgtaggt

SEQ ID NO: 101 - DNA, 50 bp, Unknown
  Description of Unknown: Dog/Cat/Human CpG sequence
cgctctcctcctgcagccgcagctcctcgccctgcagctgcagccgcacc

SEQ ID NO: 102 - DNA, 50 bp, Unknown
  Description of Unknown: Dog/Cat/Human CpG sequence
gccatgatgatgttctctgtggccatgaaaggcagctcttgccgaatgcg

SEQ ID NO: 103 - DNA, 50 bp, Unknown
  Description of Unknown: Dog/Cat/Human CpG sequence
cgcaccgcttccccaattagggctgacaggctgggggctacttggctcat

SEQ ID NO: 104 - DNA, 50 bp, Unknown
  Description of Unknown: Dog/Cat/Human CpG sequence
cgctgccctgtacatttacagaaaagtacctctgatataataaaggctca

SEQ ID NO: 105 - DNA, 50 bp, Unknown
  Description of Unknown: Dog/Cat/Human CpG sequence
cgctgtgctcctgtgaacatttcctgctatgccaagtttgcagaggccct

SEQ ID NO: 106 - DNA, 50 bp, Unknown
  Description of Unknown: Dog/Cat/Human CpG sequence
cgctttaccatcaagttccaggagttcagccccaactacatgggcctgga

SEQ ID NO: 107 - DNA, 50 bp, Unknown
  Description of Unknown: Dog/Cat/Human CpG sequence
aaaaggtttaatttccattttcctgcatcagctttatttataaaatgtcg

SEQ ID NO: 108 - DNA, 50 bp, Unknown
  Description of Unknown: Dog/Cat/Human CpG sequence
agcgagccatcctgaggtttaaacagacagaagacacacaaaggtgatcg

SEQ ID NO: 109 - DNA, 50 bp, Unknown
  Description of Unknown: Dog/Cat/Human CpG sequence
gtaaccatagagcatgaattacctcttgaggtcatcagcgagaatttacg

SEQ ID NO: 110 - DNA, 50 bp, Unknown
  Description of Unknown: Dog/Cat/Human CpG sequence
gcgtgtgtggggacttctcactgccacggacccttgatgcatgctccccg

SEQ ID NO: 111 - DNA, 50 bp, Unknown
  Description of Unknown: Dog/Cat/Human CpG sequence
cgctggtaaccgcagccagccattatgggcaggggtttcaaacatatggc

SEQ ID NO: 112 - DNA, 50 bp, Unknown
  Description of Unknown: Dog/Cat/Human CpG sequence
cgggggtttggttactttatttctaaagttgtttgtatttctaaagtggc

SEQ ID NO: 113 - DNA, 50 bp, Unknown
  Description of Unknown: Dog/Cat/Human CpG sequence
cgagctcagacagcgacagtgataagtccacagaagaccccccaatgggt

SEQ ID NO: 114 - DNA, 50 bp, Unknown
  Description of Unknown: Dog/Cat/Human CpG sequence
cgctccatctcgtgcaggaagctgtagaactgaggcaaggttaattctgg

SEQ ID NO: 115 - DNA, 50 bp, Unknown
  Description of Unknown: Dog/Cat/Human CpG sequence
cgcctgaagtaagcaaatgtccgtgtaaaccagctgtaaatttcattaag

SEQ ID NO: 116 - DNA, 50 bp, Unknown
  Description of Unknown: Dog/Cat/Human CpG sequence
cgcaccgccacctacctaccggaggttgcaaaggagcaaggtcattgttg

SEQ ID NO: 117 - DNA, 50 bp, Unknown
  Description of Unknown: Dog/Cat/Human CpG sequence
agcaatgccacctactcctgtcctcgtcagaagaactgtttgattgatcg

SEQ ID NO: 118 - DNA, 50 bp, Unknown
  Description of Unknown: Dog/Cat/Human CpG sequence
cgccttgtcattcctgaggttctcatgggcactggaagaggaaaagctca

SEQ ID NO: 119 - DNA, 50 bp, Unknown
  Description of Unknown: Dog/Cat/Human CpG sequence
cgaggataattaagtggtgaataagggtcaatgtggacaaataaatcaaa

SEQ ID NO: 120 - DNA, 50 bp, Unknown
  Description of Unknown: Dog/Cat/Human CpG sequence
cgctgatattgagtcatataggccatgtagctagcagctcgggctgcaat

SEQ ID NO: 121 - DNA, 50 bp, Unknown
  Description of Unknown: Dog/Cat/Human CpG sequence
ggcggcgtccatttcgggctacaccttcagtgctgtgtgtttccacagcg

SEQ ID NO: 122 - DNA, 50 bp, Unknown
  Description of Unknown: Dog/Cat/Human CpG sequence
gaggagtcacttttccccagggcgcagtaactatttttgctccccagtcg

SEQ ID NO: 123 - DNA, 50 bp, Unknown
  Description of Unknown: Dog/Cat/Human CpG sequence
cgggccccaagccctgccctcagtcagtgaaagcaagtgcctctcatgtg

SEQ ID NO: 124 - DNA, 50 bp, Unknown
  Description of Unknown: Dog/Cat/Human CpG sequence
cggctgcctgcaaccaggatgttcttatgagctttgaagatttttccgct

SEQ ID NO: 125 - DNA, 50 bp, Unknown
  Description of Unknown: Dog/Cat/Human CpG sequence
taattcagacattcaaatgcaaaaccgcaccatttggagagtgtaatgcg

SEQ ID NO: 126 - DNA, 50 bp, Unknown
  Description of Unknown: Dog/Cat/Human CpG sequence
tatttctcatcttactttttccttcacgtccaggtcactttaagacttcg

SEQ ID NO: 127 - DNA, 50 bp, Unknown
  Description of Unknown: Dog/Cat/Human CpG sequence
gtgctcagcaaatacaccaacctcctccagggctggcagaacaggtaacg

SEQ ID NO: 128 - DNA, 50 bp, Unknown
  Description of Unknown: Dog/Cat/Human CpG sequence
atgtatatacacaaataattggattttcctgatcaaagggggccttgccg

SEQ ID NO: 129 - DNA, 50 bp, Unknown
  Description of Unknown: Dog/Cat/Human CpG sequence
cggaattggagaatatactggtcgcaccattttaatagcacttgtgccct

SEQ ID NO: 130 - DNA, 50 bp, Unknown
  Description of Unknown: Dog/Cat/Human CpG sequence
ccgccccctaaagacaacattcccgccctagtggaggagtacctggaacg

SEQ ID NO: 131 - DNA, 50 bp, Unknown
  Description of Unknown: Dog/Cat/Human CpG sequence
cacagatgttgtttggctgaagagcagctgaatcccctctctggcagccg

SEQ ID NO: 132 - DNA, 50 bp, Unknown
  Description of Unknown: Dog/Cat/Human CpG sequence
ttaaattcagattatgctgaagcaaaatggtcctggtatgagaagcaacg

SEQ ID NO: 133 - DNA, 50 bp, Unknown
  Description of Unknown: Dog/Cat/Human CpG sequence
ggctttgtttttgtgttctaccagcagaggattacattactgattgatcg

SEQ ID NO: 134 - DNA, 50 bp, Unknown
  Description of Unknown: Dog/Cat/Human CpG sequence
cgcgtctcacgcgcttgggagagagtttgcaaagtcataattatatctct

SEQ ID NO: 135 - DNA, 50 bp, Unknown
  Description of Unknown: Dog/Cat/Human CpG sequence
gtcaaccgggcagagtctttcagacagctgtgggacggtgctcggaagcg

SEQ ID NO: 136 - DNA, 50 bp, Unknown
  Description of Unknown: Dog/Cat/Human CpG sequence
cgtgacaaacaggttggggttttgatcattaatcctgctaaagcaatatt

SEQ ID NO: 137 - DNA, 50 bp, Unknown
  Description of Unknown: Dog/Cat/Human CpG sequence
ctattcaacagtctatctctgtcatggttcatttatgtgtgagcatgacg

SEQ ID NO: 138 - DNA, 50 bp, Unknown
  Description of Unknown: Dog/Cat/Human CpG sequence
ggcttttcttattcaaaacaggcccacaatgggcttcacagtgcgcctcg

SEQ ID NO: 139 - DNA, 50 bp, Unknown
  Description of Unknown: Dog/Cat/Human CpG sequence
gaatcagtacaaaataggtgctacctaaacgttccttctacctgaattcg

SEQ ID NO: 140 - DNA, 50 bp, Unknown
  Description of Unknown: Dog/Cat/Human CpG sequence
gtccctggttaccggggcaacagaagcagtgatgaaaatcatgcctttcg

SEQ ID NO: 141 - DNA, 50 bp, Unknown
  Description of Unknown: Dog/Cat/Human CpG sequence
cgcagcagcagccgcaggagctggcccgggacagcaaaggccgcttcttt

SEQ ID NO: 142 - DNA, 50 bp, Unknown
  Description of Unknown: Dog/Cat/Human CpG sequence
cgcgcgccagcttgtccacctcgcgctccagctccgacttctgcttctgc

SEQ ID NO: 143 - DNA, 50 bp, Unknown
  Description of Unknown: Dog/Cat/Human CpG sequence
agtgagaaattcagaagactgaagcccaggcttactgtctacctttcacg

SEQ ID NO: 144 - DNA, 50 bp, Unknown
  Description of Unknown: Dog/Cat/Human CpG sequence
gtgggacctcttcatgtcccctcagttaatttcagaattaatttgcaacg

SEQ ID NO: 145 - DNA, 50 bp, Unknown
  Description of Unknown: Dog/Cat/Human CpG sequence
tgcctggtcatgtgtcgcctttttttgtttgcagtggaaacaatttctcg

SEQ ID NO: 146 - DNA, 50 bp, Unknown
  Description of Unknown: Dog/Cat/Human CpG sequence
ggctccaggaagctgctgctgacaatgaatgaagggatacggtttacgcg

SEQ ID NO: 147 - DNA, 50 bp, Unknown
  Description of Unknown: Dog/Cat/Human CpG sequence
taatcattgaacttgattgcacattctctttcccagtcatagtcaaatcg

SEQ ID NO: 148 - DNA, 50 bp, Unknown
  Description of Unknown: Dog/Cat/Human CpG sequence
agcacgaggaggtgttgcagcagtggcagatgtgcatcgagctgctctcg

SEQ ID NO: 149 - DNA, 50 bp, Unknown
  Description of Unknown: Dog/Cat/Human CpG sequence
cgggagatgaaagataggccagtttttgaaaatggcctgcgtggcacatg

SEQ ID NO: 150 - DNA, 50 bp, Unknown
  Description of Unknown: Dog/Cat/Human CpG sequence
ttcaagcaattttaattatatatttgtgctacatcagggactctggaacg

SEQ ID NO: 151 - DNA, 50 bp, Unknown
  Description of Unknown: Dog/Cat/Human CpG sequence
tctttgctatttcagggaaccaatcttccgccttcaaggcaaattgtacg

SEQ ID NO: 152 - DNA, 50 bp, Unknown
  Description of Unknown: Dog/Cat/Human CpG sequence
ggggggagcctggaaaccgccccgtgtcccatttcctcctcttgttttcg

SEQ ID NO: 153 - DNA, 50 bp, Unknown
  Description of Unknown: Dog/Cat/Human CpG sequence
tctggtgccgtgtgtggtttcaggataagctgccgatgccacccagagcg

SEQ ID NO: 154 - DNA, 50 bp, Unknown
  Description of Unknown: Dog/Cat/Human CpG sequence
cggctaagcttgctcaaatgtatgaagtgtcaaaaagtttctttgacatt

SEQ ID NO: 155 - DNA, 50 bp, Unknown
  Description of Unknown: Dog/Cat/Human CpG sequence
tgatgtgcgaggtgatgcccaccatcagcgaggatggccggcggggctcg

SEQ ID NO: 156 - DNA, 50 bp, Unknown
  Description of Unknown: Dog/Cat CpG sequence
gaactcgaagttgctcagtcaataccaagctattaatctctgtcacctcg

SEQ ID NO: 157 - DNA, 50 bp, Unknown
  Description of Unknown: Dog/Mouse/Rat/Human/Universal CpG sequence
tcagtcccagactcggcaattttctaacaaggattaaagttgtttctccg

SEQ ID NO: 158 - DNA, 50 bp, Unknown
  Description of Unknown: Dog/Mouse/Rat/Human/Universal CpG sequence
cggcctccacaaaggtgcgcggggtcagcccagcccagcccagccccaat

SEQ ID NO: 159 - DNA, 50 bp, Unknown
  Description of Unknown: Dog/Mouse/Rat/Human/Universal CpG sequence
cgctacctggacgtcagtatcttgggcaagtttgcagttgtgatggctga

SEQ ID NO: 160 - DNA, 50 bp, Unknown
  Description of Unknown: Dog/Mouse/Rat/Human/Universal CpG sequence
cgcggcactggagcaggtaccatgtgatcccagggagcgcctcgtgcccc

SEQ ID NO: 161 - DNA, 50 bp, Unknown
  Description of Unknown: Dog/Mouse/Rat/Human/Universal CpG sequence
cgggagacaggtgttaaactacttaatcactttaaaattgttttaatttt

SEQ ID NO: 162 - DNA, 50 bp, Unknown
  Description of Unknown: Dog/Mouse/Rat/Human/Universal CpG sequence
catcggcgtgctgtgggccatcttcaccatctgctttgccatcgtcaacg

SEQ ID NO: 163 - DNA, 50 bp, Unknown
  Description of Unknown: Dog/Mouse/Rat/Human/Universal CpG sequence
ttaagcacatttacatttggttcttaaaatccaaaatagcccatttcacg

SEQ ID NO: 164 - DNA, 50 bp, Unknown
  Description of Unknown: Dog/Mouse/Rat/Human/Universal CpG sequence
aataaggaatgactgccgtgactacccccatctagctatgccattcaccg

SEQ ID NO: 165 - DNA, 50 bp, Unknown
  Description of Unknown: Dog/Mouse/Rat/Human CpG sequence
ccaaacagttaggacacattgaaagagagcgtcaatcatgtattatttcg

SEQ ID NO: 166 - DNA, 50 bp, Unknown
  Description of Unknown: Dog/Mouse/Rat/Human CpG sequence
gacaccagttgaaaaccccttgaatattatgttgaacattgtcaaaaacg

SEQ ID NO: 167 - DNA, 50 bp, Unknown
  Description of Unknown: Dog/Mouse/Rat/Human CpG sequence
cccatgttttgtgtgtctctgtccatccagactcctgacgttcaagttcg

SEQ ID NO: 168 - DNA, 50 bp, Unknown
  Description of Unknown: Dog/Mouse/Rat/Human CpG sequence
cacgcactgcatttgcttctggtgcatctgctgcagctgctggagctgcg

SEQ ID NO: 169 - DNA, 50 bp, Unknown
  Description of Unknown: Dog/Mouse/Rat/Human CpG sequence
cgcaaaggttaagatgaagtttcgcttcttaggaaaattaatggccaagg

SEQ ID NO: 170 - DNA, 50 bp, Unknown
  Description of Unknown: Dog/Mouse/Rat/Human CpG sequence
tcagagccctctaagcgcgattgtttctccctttctaatgacatttaccg

SEQ ID NO: 171 - DNA, 50 bp, Unknown
  Description of Unknown: Dog/Mouse/Rat/Human CpG sequence
acagggacagcacctcatcccctggatgggggaccacaagatcctcatcg

SEQ ID NO: 172 - DNA, 50 bp, Unknown
  Description of Unknown: Dog/Mouse/Rat/Human CpG sequence
cggacaatgtgctgagagcagaaattggatggtttgactgttcaccgtat

SEQ ID NO: 173 - DNA, 50 bp, Unknown
  Description of Unknown: Dog/Mouse/Rat/Human CpG sequence
cgctcgcccttctgataggttttagaaaggtcataatttagggtattttg

SEQ ID NO: 174 - DNA, 50 bp, Unknown
  Description of Unknown: Dog/Mouse/Rat/Human CpG sequence
cgctggtattcatctaatggcttgtcaagacaaaactgtccctgttcttg

SEQ ID NO: 175 - DNA, 50 bp, Unknown
  Description of Unknown: Dog/Mouse/Rat/Human CpG sequence
cactgacagaaacatatttccccaatgagtgaccttccacagctgtagcg

SEQ ID NO: 176 - DNA, 50 bp, Unknown
  Description of Unknown: Dog/Mouse/Rat/Human CpG sequence
tcaggtggtagttcatggcgtccagcagcagcttctggcagaccgggtcg

SEQ ID NO: 177 - DNA, 50 bp, Unknown
  Description of Unknown: Dog/Mouse/Human/Universal CpG sequence
acacgagtagatcgggaagcagccatactatggcaagtccctacaatacg

SEQ ID NO: 178 - DNA, 50 bp, Unknown
  Description of Unknown: Dog/Mouse/Human/Universal CpG sequence
acttctgaaggttattaaacacccggaggtcgttaaatgcgctgttaacg

SEQ ID NO: 179 - DNA, 50 bp, Unknown
  Description of Unknown: Dog/Mouse/Human/Universal CpG sequence
cgggactgcggcaccttacggcgggaccaagatttgggtctgcgcaggcg

SEQ ID NO: 180 - DNA, 50 bp, Unknown
  Description of Unknown: Dog/Mouse/Human/Universal CpG sequence
ctctgccgaggctgttgttctcaatccagctcagaaactggctcaaaccg

SEQ ID NO: 181 - DNA, 50 bp, Unknown
  Description of Unknown: Dog/Mouse/Human/Universal CpG sequence
tgctacattttttctaggaactctgaacacatttcattcttgtgaattcg

SEQ ID NO: 182 - DNA, 50 bp, Unknown
  Description of Unknown: Dog/Mouse/Human/Universal CpG sequence
cgactggatggtccgttacgtgccctacttcaaggataaaggcgacagca

SEQ ID NO: 183 - DNA, 50 bp, Unknown
  Description of Unknown: Dog/Mouse/Human CpG sequence
cgggctagatcttcttgctgctgctcataatggtgccgcagcaatttctc

SEQ ID NO: 184 - DNA, 50 bp, Unknown
  Description of Unknown: Dog/Mouse/Human CpG sequence
tcttgagtttcattcggcggttttgaaaccaaatcttgacctgcctgtcg

SEQ ID NO: 185 - DNA, 50 bp, Unknown
  Description of Unknown: Dog/Mouse/Human CpG sequence
cgcgttcacatacccggggagggcagtagaaaggtgatcaatcttcatca

SEQ ID NO: 186 - DNA, 50 bp, Unknown
  Description of Unknown: Dog/Mouse/Human CpG sequence
gtgaacatttattgcatatatattaaaaattatcccggaatcgagtggcg

SEQ ID NO: 187 - DNA, 50 bp, Unknown
  Description of Unknown: Dog/Mouse/Human CpG sequence
ttggtctggcgccgcttggaatctggctggttgtacccatcagctttgcg

SEQ ID NO: 188 - DNA, 50 bp, Unknown
  Description of Unknown: Dog/Mouse/Human CpG sequence
cactgaaaggtaagctcattttgaagactgggcttctagaagcagagtcg

SEQ ID NO: 189 - DNA, 50 bp, Unknown
  Description of Unknown: Dog/Mouse/Human CpG sequence
aatatagactctgccaggatgggaaggtgcttttcaggcctacgtcaccg

SEQ ID NO: 190 - DNA, 50 bp, Unknown
  Description of Unknown: Dog/Mouse/Human CpG sequence
tggtacaggaacaccaagtctataaggccattgtgtagcaccaggggccg

SEQ ID NO: 191 - DNA, 50 bp, Unknown
  Description of Unknown: Dog/Mouse/Human CpG sequence
tgggggaccagtgccagcactgccagggcaggttcaagtaagtgccttcg

SEQ ID NO: 192 - DNA, 50 bp, Unknown
  Description of Unknown: Dog/Mouse/Human CpG sequence
cgcctcccccgcaggtcctgctgcactctccccatagtgaccagggaccc

SEQ ID NO: 193 - DNA, 50 bp, Unknown
  Description of Unknown: Dog/Mouse/Human CpG sequence
cggctaatgcattttccaatgtgtgaggcagattattaatgcgctccagt

SEQ ID NO: 194 - DNA, 50 bp, Unknown
  Description of Unknown: Dog/Mouse/Human CpG sequence
atcaaatggccaatcctgttagcggcttaaaagagacataattacctgcg

SEQ ID NO: 195 - DNA, 50 bp, Unknown
  Description of Unknown: Dog/Mouse/Human CpG sequence
ctcggagacaaacctcctggtgtaaaatcaaccgtcataaaacatattcg

SEQ ID NO: 196 - DNA, 50 bp, Unknown
  Description of Unknown: Dog/Mouse/Human CpG sequence
cggtccatttctgggcgctgcaagatcagcagaaacctgagaaagcgcct

SEQ ID NO: 197 - DNA, 50 bp, Unknown
  Description of Unknown: Dog/Mouse/Human CpG sequence
cgctgggtggttcagactcacatgtcacacacatgtcgtcagcaacaaga

SEQ ID NO: 198 - DNA, 50 bp, Unknown
  Description of Unknown: Dog/Mouse/Human CpG sequence
tgcaaacaaccgggaatgcgatgcatttgtgtagcgtgtgcaaatgggcg

SEQ ID NO: 199 - DNA, 50 bp, Unknown
  Description of Unknown: Dog/Mouse/Human CpG sequence
cgggaacatgatattgcaattaaattcttccagagagctatccaagttga

SEQ ID NO: 200 - DNA, 50 bp, Unknown
  Description of Unknown: Dog/Mouse/Human CpG sequence
ctaccttgccattgtctaggatatacttgtccatgacaggcgcaggagcg

SEQ ID NO: 201 - DNA, 49 bp, Unknown
  Description of Unknown: Dog/Mouse/Human CpG sequence
ggctgcaggagcggcaacagcagcggcggctgctgaggggacaggaatc

SEQ ID NO: 202 - DNA, 50 bp, Unknown
  Description of Unknown: Dog/Mouse/Human CpG sequence
atttgctttcgcttctgaaagagccgctattctttgatgattgggtagcg

SEQ ID NO: 203 - DNA, 50 bp, Unknown
  Description of Unknown: Dog/Mouse/Human CpG sequence
gaaggggtccggcccagtcgagcctgacgctctcaccacaggagctggcg

SEQ ID NO: 204 - DNA, 50 bp, Unknown
  Description of Unknown: Dog/Mouse/Human CpG sequence
atcgagaagcagctgcagaaggacaagcaggtctaccgggccacgcaccg

SEQ ID NO: 205 - DNA, 50 bp, Unknown
  Description of Unknown: Dog/Mouse/Universal CpG sequence
cgccgaggccccctctaggcagcagcctcagcccctggtggagatccagt

SEQ ID NO: 206 - DNA, 50 bp, Unknown
  Description of Unknown: Dog/Mouse/Universal CpG sequence
cggcgtgattgaagggtttttaacaattaacataatcagaaaatgagctg

SEQ ID NO: 207 - DNA, 50 bp, Unknown
  Description of Unknown: Dog/Mouse CpG sequence
cggcgacaaagggcaatattcacagtttatctcagggtgatggatctgaa

SEQ ID NO: 208 - DNA, 50 bp, Unknown
  Description of Unknown: Dog/Mouse CpG sequence
ccgcttctaacccctgtaataaatgcatttggagtaatctggcgatcacg

SEQ ID NO: 209 - DNA, 50 bp, Unknown
  Description of Unknown: Dog/Rat/Human/Universal CpG sequence
cgtgtacaaaagttcttggttaattagggaaataaacactcagttcttta

SEQ ID NO: 210 - DNA, 50 bp, Unknown
  Description of Unknown: Dog/Rat/Human/Universal CpG sequence
cggaatttgaaatcccagcgagtcggtgccatttattttcagaggctgtc

SEQ ID NO: 211 - DNA, 50 bp, Unknown
  Description of Unknown: Dog/Rat/Human/Universal CpG sequence
gggtggcatttccttcagtgttaacaacagaggttaactgcacacagacg

SEQ ID NO: 212 - DNA, 50 bp, Unknown
  Description of Unknown: Dog/Rat/Human/Universal CpG sequence
aagagatgaccatgaccaccatgccagaaagtctcaacagccccgtgtcg

SEQ ID NO: 213 - DNA, 50 bp, Unknown
  Description of Unknown: Dog/Rat/Human/Universal CpG sequence
cggttgaatgtgctgtggaatttgtttgcaaacctacgagagcgaagcga

SEQ ID NO: 214 - DNA, 50 bp, Unknown
  Description of Unknown: Dog/Rat/Human/Universal CpG sequence
gtctcaagggccagtgtcgggacagttgtcagcagggctccaacatgacg

SEQ ID NO: 215 - DNA, 50 bp, Unknown
  Description of Unknown: Dog/Rat/Human/Universal CpG sequence
cgtcggaatttgccgaggtattcttgcagtttggggtcaatgtccaaatt

SEQ ID NO: 216 - DNA, 50 bp, Unknown
  Description of Unknown: Dog/Rat/Human/Universal CpG sequence
aattttactagctttctgcccctaactgctctctcatcgttaattaaacg

SEQ ID NO: 217 - DNA, 50 bp, Unknown
  Description of Unknown: Dog/Rat/Human CpG sequence
catcatgacatggcaaacggctatataaatgaatttttctaaaccacacg

SEQ ID NO: 218 - DNA, 50 bp, Unknown; identical to SEQ ID NO: 49
  Description of Unknown: Dog/Rat/Human CpG sequence

SEQ ID NO: 219 - DNA, 50 bp, Unknown
  Description of Unknown: Dog/Rat/Human CpG sequence
cgccggagggaactctcagaccgcttgaatcttagtgaccagcaggtcaa

SEQ ID NO: 220 - DNA, 50 bp, Unknown
  Description of Unknown: Dog/Rat/Human CpG sequence
agctgaaggtcttgaggcgcaggctggtgtccagggggcggctcatcccg

SEQ ID NO: 221 - DNA, 50 bp, Unknown
  Description of Unknown: Dog/Rat/Human CpG sequence
cggcccaacgtgcaggaccagctccaggtagagaggctgcagcacacata

SEQ ID NO: 222 - DNA, 50 bp, Unknown
  Description of Unknown: Dog/Rat/Human CpG sequence
cgccaggaattgcggggcggcaccttttaaatatataattgattctgttt

SEQ ID NO: 223 - DNA, 50 bp, Unknown
  Description of Unknown: Dog/Rat/Human CpG sequence
atgaatttcaccaccaaaaacacaacaacttctccaatcataaaataccg

SEQ ID NO: 224 - DNA, 50 bp, Unknown
  Description of Unknown: Dog/Rat/Human CpG sequence
cgaaaagatcagtatctgtcagtctgacagctgattggctgctcggagat

SEQ ID NO: 225 - DNA, 50 bp, Unknown
  Description of Unknown: Dog/Rat/Human CpG sequence
cgcctttccagatgcaaaagttcagcccctctgatgtcatgacggatgaa

SEQ ID NO: 226 - DNA, 50 bp, Unknown
  Description of Unknown: Dog/Rat/Human CpG sequence
agacacctggatagcagacttggctctgattgggcagctcagtagcagcg

SEQ ID NO: 227 - DNA, 50 bp, Unknown
  Description of Unknown: Dog/Rat/Human CpG sequence
ggcacacgttgatggccatgtgctcctggatgttgatggtcatgcgatcg

SEQ ID NO: 228 - DNA, 50 bp, Unknown
  Description of Unknown: Dog/Rat/Human CpG sequence
cgcggaataaaagatgctacagaaatcatctttgagatgtcaaaagacga

SEQ ID NO: 229 - DNA, 50 bp, Unknown
  Description of Unknown: Dog/Rat/Human CpG sequence
cgccctgattgggatcagataaagagggaatttttacaaattagggaata

SEQ ID NO: 230 - DNA, 50 bp, Unknown
  Description of Unknown: Dog/Rat/Human CpG sequence
gaaagcaaaacattcaatcaggcggattaagtgcgtaatgcgtctcatcg

SEQ ID NO: 231 - DNA, 50 bp, Unknown
  Description of Unknown: Dog/Rat/Human CpG sequence
cgcccctgaattcgcatccgaatatgaggcatttttatgtgaaaatggaa

SEQ ID NO: 232 - DNA, 50 bp, Unknown
  Description of Unknown: Dog/Rat/Human CpG sequence
cggcctcataaatcagtttttaagtagcaaccacatggacatttcccagc

SEQ ID NO: 233 - DNA, 50 bp, Unknown
  Description of Unknown: Dog/Rat/Human CpG sequence
cgtcaagctgaattaagcatacaaatcagatgaggcatagcagattacac

SEQ ID NO: 234 - DNA, 50 bp, Unknown
  Description of Unknown: Dog/Rat/Human CpG sequence
ggtcaaggggcttccgaggtcattttgtggttctaatactgagctaatcg

SEQ ID NO: 235 - DNA, 50 bp, Unknown
  Description of Unknown: Dog/Rat/Human CpG sequence
cggggggaagaggctcaatttgtagcctattatcctatacgaaaatgtcc

SEQ ID NO: 236 - DNA, 50 bp, Unknown
  Description of Unknown: Dog/Rat/Human CpG sequence
catgtacatgctgctgaagcacctggtagacaggtacaatctctactacg

SEQ ID NO: 237 - DNA, 50 bp, Unknown
  Description of Unknown: Dog/Rat/Human CpG sequence
gcatgatttccttctgtatcttggggtcctgagtattaatgttggcatcg

SEQ ID NO: 238 - DNA, 50 bp, Unknown
  Description of Unknown: Dog/Rat/Human CpG sequence
cgtgtctttaaaatgcaactgcaggtagagaagactgttaaccctttgct

SEQ ID NO: 239 - DNA, 50 bp, Unknown
  Description of Unknown: Dog/Rat/Human CpG sequence
gcttgtaactgttaaaaatgacttgttaggaagcgtgtgggctctcatcg

SEQ ID NO: 240 - DNA, 50 bp, Unknown
  Description of Unknown: Dog/Rat/Human CpG sequence
tcctagctcttgctcagagttgaggccttggtcgggtatgtgtgcgtgcg

SEQ ID NO: 241 - DNA, 50 bp, Unknown
  Description of Unknown: Dog/Rat/Human CpG sequence
cggcaccaacagatttacttgatttgcaagttaactacaacattaactgg

SEQ ID NO: 242 - DNA, 50 bp, Unknown
  Description of Unknown: Dog/Rat/Human CpG sequence
cgtgctaactccagactatattctcagacggggatggagtattttcgaac

SEQ ID NO: 243 - DNA, 50 bp, Unknown
  Description of Unknown: Dog/Rat/Human CpG sequence
cgtggctacgtcatggaaagccagtcttttcaatgcaaacttcaactcct

SEQ ID NO: 244 - DNA, 50 bp, Unknown
  Description of Unknown: Dog/Rat/Human CpG sequence
gacacggaccctgagctggtgttcctttgccgccatgtctatgacttccg

SEQ ID NO: 245 - DNA, 50 bp, Unknown
  Description of Unknown: Dog/Rat/Human CpG sequence
cgtgagaaggagctttgtgttttggagtctggactggaaccaaagcagac

SEQ ID NO: 246 - DNA, 50 bp, Unknown
  Description of Unknown: Dog/Rat/Human CpG sequence
gcttccactgtgaacgcctcccggggaatctcagccagcacttctggacg

SEQ ID NO: 247 - DNA, 50 bp, Unknown
  Description of Unknown: Dog/Rat/Human CpG sequence
tgggggattataaatgttcacgcaatcaagttcattaggacttcaaatcg

SEQ ID NO: 248 - DNA, 50 bp, Unknown
  Description of Unknown: Dog/Rat/Human CpG sequence
tatagagtgtataaaacaagtttccccttcttattttctgctttaaaacg

SEQ ID NO: 249 - DNA, 50 bp, Unknown
  Description of Unknown: Dog/Rat/Human CpG sequence
cggagcaaatctggcccagaaggctgcacatatttttgcctggatagact

SEQ ID NO: 250 - DNA, 50 bp, Unknown
  Description of Unknown: Dog/Rat/Human CpG sequence
cggaccgctgccaaagtcagagggaaaatgaagtctttgttaaatgcctt

SEQ ID NO: 251 - DNA, 50 bp, Unknown
  Description of Unknown: Dog/Rat/Human CpG sequence
ttttggtcactccacagggctaaaatagccgagttggctttaatgtgtcg

SEQ ID NO: 252 - DNA, 50 bp, Unknown
  Description of Unknown: Dog/Rat/Human CpG sequence
cgcccaggcctgcctcgatggccatcactacttccaaagacaggttgtag

SEQ ID NO: 253 - DNA, 50 bp, Unknown
  Description of Unknown: Dog/Rat/Human CpG sequence
cggccaataaaaggtttatgacatctgaccggcagtgaaggtatgcgagc

SEQ ID NO: 254 - DNA, 50 bp, Unknown
  Description of Unknown: Dog/Rat/Human CpG sequence
ccgaaacgaaaagacaatttacccatcactgagtctctgctgtttcctcg

SEQ ID NO: 255 - DNA, 50 bp, Unknown
  Description of Unknown: Dog/Rat/Human CpG sequence
cggcttactttagctacttacgctggactgtcacagtgtcttagggatga

SEQ ID NO: 256 - DNA, 50 bp, Unknown
  Description of Unknown: Dog/Rat/Human CpG sequence
cgtcctgtgcccagataaacaagaaagagaaaaggagtcatcatgtcaac

SEQ ID NO: 257 - DNA, 50 bp, Unknown
  Description of Unknown: Dog/Rat/Human CpG sequence
cgggagagccgggttagaaagaaggagactccagagaaaatatcttcatc

SEQ ID NO: 258 - DNA, 50 bp, Unknown
  Description of Unknown: Dog/Rat/Human CpG sequence
cgccgcatggtcaaaactcaggccttctactggactgtactcagtttggt

SEQ ID NO: 259 - DNA, 50 bp, Unknown
  Description of Unknown: Dog/Rat/Human CpG sequence
cgcaaaagtccggttgcagagcttacattggaatgtggagcccaagtctt

SEQ ID NO: 260 - DNA, 50 bp, Unknown
  Description of Unknown: Dog/Rat/Human CpG sequence
tccgtgtatggcagcttggtggacacgtgaaacatgatctccttgttgcg

SEQ ID NO: 261 - DNA, 50 bp, Unknown
  Description of Unknown: Dog/Rat/Human CpG sequence
cgctccctggagaatttcagttctgtaaatgaaacaattattttggcagt

SEQ ID NO: 262 - DNA, 50 bp, Unknown
  Description of Unknown: Dog/Rat/Human CpG sequence
cgctgggtcaatatagctgcttgtcaattcagaaatgcaaagtgctgtgt

SEQ ID NO: 263 - DNA, 50 bp, Unknown
  Description of Unknown: Dog/Rat/Human CpG sequence
aaaagttaacactacagcaacgctatatttaccagggcctgcccatatcg

SEQ ID NO: 264 - DNA, 50 bp, Unknown
  Description of Unknown: Dog/Rat/Human CpG sequence
cggcgcttccgagcaccgtcccacagctgtctgaaagactctgcccggtt

SEQ ID NO: 265 - DNA, 50 bp, Unknown
  Description of Unknown: Dog/Rat/Human CpG sequence
gaatgtaattaggttgtcatcctggggcctccgagccaggcttccgaacg

SEQ ID NO: 266 - DNA, 50 bp, Unknown
  Description of Unknown: Dog/Rat/Human CpG sequence
cgccaccgggaaaacccaagagtacaataatagccccgaaggcagctcca

SEQ ID NO: 267 - DNA, 50 bp, Unknown
  Description of Unknown: Dog/Rat/Human CpG sequence
cgtcagccgtctttcaccaacctcaaaggaaagttgaatgcggggctcac

SEQ ID NO: 268 - DNA, 50 bp, Unknown
  Description of Unknown: Dog/Rat/Human CpG sequence
tgaccaaatcgagcagttcaacgaccacatgaggatgcatgtgtctgacg

SEQ ID NO: 269 - DNA, 50 bp, Unknown
  Description of Unknown: Dog/Rat/Human CpG sequence
cgccattcatcagtttatgcattgtgcgccagggcaaataatgacagaat

SEQ ID NO: 270 - DNA, 50 bp, Unknown
  Description of Unknown: Dog/Rat/Human CpG sequence
cgcacaaagaggatcccatggcaacaaacagcgaggcccacagttggctc

SEQ ID NO: 271 - DNA, 50 bp, Unknown
  Description of Unknown: Dog/Rat/Human CpG sequence
cgccctaacaaagaggcagaaactgtgtctcaacagccaccaaatccagt

SEQ ID NO: 272 - DNA, 50 bp, Unknown
  Description of Unknown: Dog/Rat/Human CpG sequence
cggaactcccaggaaacctggatgaagtgtaattatctcagctcaatcag

SEQ ID NO: 273 - DNA, 50 bp, Unknown
  Description of Unknown: Dog/Rat/Human CpG sequence
cgaccttaaagagtctgcgaggctgaatgaattggtgcatctcgctgcat

SEQ ID NO: 274 - DNA, 50 bp, Unknown
  Description of Unknown: Dog/Rat/Human CpG sequence
gaggaaataatagccatttccaatgataatacacaattttagcactgacg

SEQ ID NO: 275 - DNA, 50 bp, Unknown
  Description of Unknown: Dog/Rat/Human CpG sequence
aaaaatggcaaaagcccccctgagctgcaagttcaagtgcggacgtgacg

SEQ ID NO: 276 - DNA, 50 bp, Unknown
  Description of Unknown: Dog/Rat/Human CpG sequence
cgaacagaggagaagccgagtagggagcaggtggctatcatgagaacaca

SEQ ID NO: 277 - DNA, 50 bp, Unknown
  Description of Unknown: Dog/Rat/Human CpG sequence
ttagccattataggctaataaatcatactttctctttgagttgtcaatcg

SEQ ID NO: 278 - DNA, 50 bp, Unknown
  Description of Unknown: Dog/Rat/Human CpG sequence
tgggtaaatggagttgtctctttaaagtgccccggtcagttcaccacacg

SEQ ID NO: 279 - DNA, 50 bp, Unknown
  Description of Unknown: Dog/Rat/Human CpG sequence
cgcttgttatagtccaataagccgtgccagtcaaacaagaacccacacta

SEQ ID NO: 280 - DNA, 50 bp, Unknown
  Description of Unknown: Dog/Rat/Human CpG sequence
cgtggtgcgctatgagacccctgagggcactttctgggccaacaaccacg

SEQ ID NO: 281 - DNA, 50 bp, Unknown
  Description of Unknown: Dog/Rat/Human CpG sequence
cgaggcattgctagtgaccagtttgtaaaatgcaatctgttattttattt

SEQ ID NO: 282 - DNA, 50 bp, Unknown
  Description of Unknown: Dog/Rat/Human CpG sequence
ctttggaagtttatagcaccctctaatacctctggagccatgtacctccg

SEQ ID NO: 283 - DNA, 50 bp, Unknown
  Description of Unknown: Dog/Rat/Human CpG sequence
cgctggattgaatactagattactccaaagtggctgagggtcagggatca

SEQ ID NO: 284 - DNA, 50 bp, Unknown
  Description of Unknown: Dog/Rat/Human CpG sequence
ttgcggccgtggttgttggcccagaaagtgccctcaggggtctcatagcg

SEQ ID NO: 285 - DNA, 50 bp, Unknown
  Description of Unknown: Dog/Rat/Human CpG sequence
gcgttcccaaaatatgaccaggggtgcttggatgtgtcggcagtatgacg

SEQ ID NO: 286 - DNA, 50 bp, Unknown
  Description of Unknown: Dog/Rat/Human CpG sequence
cggatgctcttgcgctgccatttctgggtgctgtcactgtccttgctcac

SEQ ID NO: 287 - DNA, 50 bp, Unknown
  Description of Unknown: Dog/Rat/Human CpG sequence
cgccagaagccgaggcacaaacagacgatgccccatccccagaagttcca

SEQ ID NO: 288 - DNA, 50 bp, Unknown
  Description of Unknown: Dog/Rat/Human CpG sequence
cgcactagcatggcgccagccatgtacttacaatgtagttacagagtaat

SEQ ID NO: 289 - DNA, 50 bp, Unknown
  Description of Unknown: Dog/Rat/Human CpG sequence
tttcttcctgtgcctgaacctctctttcgcttttgtggaactactctacg

SEQ ID NO: 290 - DNA, 50 bp, Unknown
  Description of Unknown: Dog/Rat/Human CpG sequence
agtcattatatcaatttttgttacccagatacttcagtcccagttaagcg

SEQ ID NO: 291 - DNA, 50 bp, Unknown
  Description of Unknown: Dog/Rat/Human CpG sequence
ccaaggaggcttcaagacaaagggccccttacacaccagacaggtaaacg

SEQ ID NO: 292 - DNA, 50 bp, Unknown
  Description of Unknown: Dog/Rat/Human CpG sequence
tgctggagtagcactccaggtcctcgctgatgctgctgatgatgctgacg

SEQ ID NO: 293 - DNA, 50 bp, Unknown
  Description of Unknown: Dog/Rat/Human CpG sequence
agctccccagaggcccttagactgagaactatgattgtgttggagaaacg

SEQ ID NO: 294 - DNA, 50 bp, Unknown
  Description of Unknown: Dog/Human/Universal CpG sequence
cgctgaaccaggagacaaacacgattaccagctccgagccttgagtcaga

SEQ ID NO: 295 - DNA, 50 bp, Unknown
  Description of Unknown: Dog/Human/Universal CpG sequence
cgccacccagcgggcagggtgacgtcaccgtctccctgacactccacatt

SEQ ID NO: 296 - DNA, 50 bp, Unknown
  Description of Unknown: Dog/Human/Universal CpG sequence
gctgggagcagccatcccataatagctggccgcctgttttactggttacg

SEQ ID NO: 297 - DNA, 50 bp, Unknown
  Description of Unknown: Dog/Human/Universal CpG sequence
cggaatttcgttttcaaataaaccacaagcttggatgagctaatgttgtt

SEQ ID NO: 298 - DNA, 50 bp, Unknown
  Description of Unknown: Dog/Human/Universal CpG sequence
gctcagctccattggaatgctccgggcgctgtccaaggtgctggaatgcg

SEQ ID NO: 299 - DNA, 50 bp, Unknown
  Description of Unknown: Dog/Human/Universal CpG sequence
aatatttgtgacagatacaacaaattcttgcacaaattacatttcattcg

SEQ ID NO: 300 - DNA, 50 bp, Unknown
  Description of Unknown: Dog/Human/Universal CpG sequence
atacaaaaccggggagtccctgcgccccaattattatgactgcggcttcg

SEQ ID NO: 301 - DNA, 50 bp, Unknown
  Description of Unknown: Dog/Human/Universal CpG sequence
cggacctaacttttagaggatcaatgtgacaaggcagtccctgatagatg

SEQ ID NO: 302 - DNA, 50 bp, Unknown
  Description of Unknown: Dog/Human/Universal CpG sequence
tggtgaatcaatctttccattcctgacattttgctaattttagttttacg

SEQ ID NO: 303 - DNA, 50 bp, Unknown
  Description of Unknown: Dog/Human/Universal CpG sequence
cgctttacatttcgaagaagggatgccagttcataaacagttttcggtga

SEQ ID NO: 304 - DNA, 50 bp, Unknown
  Description of Unknown: Dog/Human/Universal CpG sequence
tattcccctagatacgaatttgtgaccacaaaattccttacacaaattcg

SEQ ID NO: 305 - DNA, 50 bp, Unknown
  Description of Unknown: Dog/Human/Universal CpG sequence
tttgtctggtcgccgcgtaattcgcgcatccttattcagatttggtgacg

SEQ ID NO: 306 - DNA, 50 bp, Unknown
  Description of Unknown: Dog/Human/Universal CpG sequence
tgagctaggcctatttccctttctgttactatgacaacgaaattttaccg

SEQ ID NO: 307 - DNA, 50 bp, Unknown
  Description of Unknown: Dog/Human/Universal CpG sequence
gtgtacaagggcgagtggacgcacggattcaaggggcgctacggggtgcg

SEQ ID NO: 308 - DNA, 50 bp, Unknown
  Description of Unknown: Dog/Human/Universal CpG sequence
cgagtgagggaattgccatgcagaaataaatggtaaaactgggaagtcgg

SEQ ID NO: 309 - DNA, 50 bp, Unknown
  Description of Unknown: Dog/Human/Universal CpG sequence
ggagagttagtgctgtcagtttctctcacctcagaaagccgccgcaatcg

SEQ ID NO: 310 - DNA, 50 bp, Unknown
  Description of Unknown: Dog/Human/Universal CpG sequence
cgctgatagaataataaatgacagagtaattaccattataaagagggaat

SEQ ID NO: 311 - DNA, 50 bp, Unknown
  Description of Unknown: Dog/Human/Universal CpG sequence
catataagggcttttgatacacatgacttacttggatgacaaggggctcg

SEQ ID NO: 312 - DNA, 50 bp, Unknown
  Description of Unknown: Dog/Human/Universal CpG sequence
gttcaaattgccagcttcttaaaaaccgcccattggaataaattgcatcg

SEQ ID NO: 313 - DNA, 50 bp, Unknown
  Description of Unknown: Dog/Human/Universal CpG sequence
cgtgccaaaaaaggggcagagtttgatggagttgggtggacttttctatg

SEQ ID NO: 314 - DNA, 50 bp, Unknown
  Description of Unknown: Dog/Human/Universal CpG sequence
ttcagcaaagtttatctgcccgacatagcaggaagtgctaatttcatccg

SEQ ID NO: 315 - DNA, 50 bp, Unknown
  Description of Unknown: Dog/Human/Universal CpG sequence
aagcgcaaataagctcccaattgtctccccaatatgtaaaccacatctcg

SEQ ID NO: 316 - DNA, 50 bp, Unknown
  Description of Unknown: Dog/Human/Universal CpG sequence
cctcagcctaacttcctttatttcctcacaagtttctccctcaaacttcg

SEQ ID NO: 317 - DNA, 50 bp, Unknown
  Description of Unknown: Dog/Human/Universal CpG sequence
aggggcggagctgtgggaggcagccatgggtgccataataggcacctgcg

SEQ ID NO: 318 - DNA, 50 bp, Unknown
  Description of Unknown: Dog/Human/Universal CpG sequence
cgtgagcagcttacgacactcagtgagcagtaggtgcctgtgcaagctcg

SEQ ID NO: 319 - DNA, 50 bp, Unknown
  Description of Unknown: Dog/Human/Universal CpG sequence
ggtccctgtcggtgccacggacgcttaaataaaatgaatctgtatttccg

SEQ ID NO: 320 - DNA, 50 bp, Unknown
  Description of Unknown: Dog/Human/Universal CpG sequence
attctcctcatgctattgtggtaagaggcgcacttgaaatctctcaaacg

SEQ ID NO: 321 - DNA, 50 bp, Unknown
  Description of Unknown: Dog/Human/Universal CpG sequence
atgattacctgctgctgctgccgccgcggctgaactctcatcttgactcg

SEQ ID NO: 322 - DNA, 50 bp, Unknown
  Description of Unknown: Dog/Human/Universal CpG sequence
cgggtctttgcaacctggggtgccttgaccaacgagtcaaggttgaccaa

SEQ ID NO: 323 - DNA, 50 bp, Unknown
  Description of Unknown: Dog/Human/Universal CpG sequence
tctctccttaataataaaattataccaagcagtttgcggtgtggcaggcg

SEQ ID NO: 324 - DNA, 50 bp, Unknown
  Description of Unknown: Dog/Human/Universal CpG sequence
tcagtgccttgttggctaaaggccagagtgccattagaacatgctgtacg

SEQ ID NO: 325 - DNA, 50 bp, Unknown
  Description of Unknown: Dog/Human/Universal CpG sequence
cgactctgcttgaaggaatgtgacaataaagtgggaaaccaaagcttggc

SEQ ID NO: 326 - DNA, 50 bp, Unknown
  Description of Unknown: Dog/Human CpG sequence
cgattccccacaaaggtttcagcaccatgaccaattggtcagctcctccg

SEQ ID NO: 327 - DNA, 50 bp, Unknown
  Description of Unknown: Dog/Human CpG sequence
cgggtctgaaactacctgtagctgcagctacctgcccgccccacctcggg

SEQ ID NO: 328 - DNA, 50 bp, Unknown
  Description of Unknown: Dog/Human CpG sequence
cgccctcgagcggagcaaggcgattgagaaaaacctcaaagaggatggca

SEQ ID NO: 329 - DNA, 50 bp, Unknown
  Description of Unknown: Dog/Human CpG sequence
cgtgctcagaagtgttgaaagaaaggcccattctctgcccagggaattgc

SEQ ID NO: 330 - DNA, 50 bp, Unknown
  Description of Unknown: Dog/Human CpG sequence
aggaaatttaaaggcttggaccctgcgagacagacaaaccggtgccaacg

SEQ ID NO: 331 - DNA, 50 bp, Unknown
  Description of Unknown: Dog/Human CpG sequence
tccatgatgaccagagttggctggccctgagataccacacccaggagacg

SEQ ID NO: 332 - DNA, 50 bp, Unknown
  Description of Unknown: Dog/Human CpG sequence
ttccacctaaaacgtttagtttcagctcagtgatcagctaccccagctcg

SEQ ID NO: 333 - DNA, 50 bp, Unknown
  Description of Unknown: Dog/Human CpG sequence
ggaaatgataaaaagttcatgttcacgatcgcccggccacatgaccggcg

SEQ ID NO: 334 - DNA, 50 bp, Unknown
  Description of Unknown: Dog/Human CpG sequence
cgggcagaaaacataaaagaggtgacaattgtatactttctaggacaagc

SEQ ID NO: 335 - DNA, 50 bp, Unknown
  Description of Unknown: Dog/Human CpG sequence
actgaccaatggcagaggcaggaattgtcaaatagcacccaggaggagcg

SEQ ID NO: 336 - DNA, 50 bp, Unknown
  Description of Unknown: Dog/Human CpG sequence
cggcatattgcctttttcagtgagggcatggctgtttatagcactttcat

SEQ ID NO: 337 - DNA, 50 bp, Unknown
  Description of Unknown: Dog/Human CpG sequence
cgagctcatgctggcagaatagattggggttttaaaaccccaattacttt

SEQ ID NO: 338 - DNA, 50 bp, Unknown
  Description of Unknown: Dog/Human CpG sequence
acgtgtggcccagcaggttgggcatgcgggtcaggttgtagccgatgccg

SEQ ID NO: 339 - DNA, 50 bp, Unknown
  Description of Unknown: Dog/Human CpG sequence
cggggagggatcatggatacttgtctgccggcttctggttcccacgcaag

SEQ ID NO: 340 - DNA, 50 bp, Unknown
  Description of Unknown: Dog/Human CpG sequence
tgaagttcctatgaaactattaaacccgggtggaggtcaggctggaggcg

SEQ ID NO: 341 - DNA, 50 bp, Unknown
  Description of Unknown: Dog/Human CpG sequence
cgctttgaaagaagtagaacaacatctctaaacaaattatgactgggcca

SEQ ID NO: 342 - DNA, 50 bp, Unknown
  Description of Unknown: Dog/Human CpG sequence
atccattgtggcacaatgtaatatgtatcaccatgctacacctgcggacg

SEQ ID NO: 343 - DNA, 50 bp, Unknown
  Description of Unknown: Dog/Human CpG sequence
cgatgcatagagtgcaagatgatatgcccttcttggtccagtgtattgtt

SEQ ID NO: 344 - DNA, 50 bp, Unknown
  Description of Unknown: Dog/Human CpG sequence
agctgcagaagcagaagtcggagctggagcgcgaggtggacaagctggcg

SEQ ID NO: 345 - DNA, 50 bp, Unknown
  Description of Unknown: Dog/Human CpG sequence
gggcaggatggagagcgtcttcaaccaggccatcaggaacaccatctacg

SEQ ID NO: 346 - DNA, 50 bp, Unknown
  Description of Unknown: Dog/Human CpG sequence
aaagtaacaatccgccattacaaaggtcgtcctccttgatccagttaacg

SEQ ID NO: 347 - DNA, 50 bp, Unknown
  Description of Unknown: Dog/Human CpG sequence
agtcagcacagccattctcttcctgatgagggactttgaagacagtgacg

SEQ ID NO: 348 - DNA, 50 bp, Unknown
  Description of Unknown: Dog/Human CpG sequence
cgaattcactcagtaaaattagcataagtatttaccagattaagctgaca

SEQ ID NO: 349 - DNA, 50 bp, Unknown
  Description of Unknown: Dog/Human CpG sequence
tcagtttattggcttgggatcctgtttttttcaccttcataggagcatcg

SEQ ID NO: 350 - DNA, 50 bp, Unknown
  Description of Unknown: Dog/Human CpG sequence
cgcaggcaggcctgcgtgcggacagatttaatatcgtttgtaaatatgat

SEQ ID NO: 351 - DNA, 50 bp, Unknown
  Description of Unknown: Dog/Human CpG sequence
cgtcacggagctttcccggggctcagataaataggctggtggagttccct

SEQ ID NO: 352 - DNA, 50 bp, Unknown
  Description of Unknown: Dog/Human CpG sequence
cgccttcatgtcgctcagcaactcctccagctggttcagaactggggccc

SEQ ID NO: 353 - DNA, 50 bp, Unknown
  Description of Unknown: Dog/Human CpG sequence
cgccaggacccagctcatatcctgtgtaacccagtgggagaggagccaca

SEQ ID NO: 354 - DNA, 50 bp, Unknown
  Description of Unknown: Dog/Human CpG sequence
cgggaagggctaattagccaccttctggatcaataagattcagcaaaaaa

SEQ ID NO: 355 - DNA, 50 bp, Unknown
  Description of Unknown: Dog/Human CpG sequence
cgagctgctccactttccagccaatgtcaggaggggggatctccgccgcc

SEQ ID NO: 356 - DNA, 50 bp, Unknown
  Description of Unknown: Dog/Human CpG sequence
cgccaactattctgggagatacacgagccctccatgtttatcaggttgag

SEQ ID NO: 357 - DNA, 50 bp, Unknown
  Description of Unknown: Dog/Human CpG sequence
cggcgcgagttgcctctccgcttcacgctcgatttccaggcattcttccc

SEQ ID NO: 358 - DNA, 50 bp, Unknown
  Description of Unknown: Dog/Human CpG sequence
cgcgtctaggctgagatggttcgcgtggatattgctactcattctaagac

SEQ ID NO: 359 - DNA, 50 bp, Unknown
  Description of Unknown: Dog/Human CpG sequence
ggctggcgaaagacttcctcaggctgcggatggtctcagctttcacctcg

SEQ ID NO: 360 - DNA, 50 bp, Unknown
  Description of Unknown: Dog/Human CpG sequence
cgctgttaacgaggtattaatcaacacccctcaggaaaaaataaaaagac

SEQ ID NO: 361 - DNA, 50 bp, Unknown
  Description of Unknown: Dog/Human CpG sequence
gaaggtgaaccaccgcaagtacctgcagaagcagatcaagcgctgcagcg

SEQ ID NO: 362 - DNA, 50 bp, Unknown
  Description of Unknown: Dog/Human CpG sequence
tataattatcggaagcagtgccttccataattatgacagttatactgtcg

SEQ ID NO: 363 - DNA, 50 bp, Unknown
  Description of Unknown: Dog/Human CpG sequence
agaaggaccttgtaataaataatattctgcacatcaaatcactttcaccg

SEQ ID NO: 364 - DNA, 50 bp, Unknown
  Description of Unknown: Dog/Human CpG sequence
gccctattccctggagattctgagattgaccagctcttccggatctttcg

SEQ ID NO: 365 - DNA, 50 bp, Unknown
  Description of Unknown: Dog/Human CpG sequence
ggatcacatcgttggggtccatggtggtcttcagcaggcccctgtagacg

SEQ ID NO: 366 - DNA, 50 bp, Unknown
  Description of Unknown: Dog/Human CpG sequence
ctcctaggagctcacagctccaaacatcaattaccatgattatctacccg

SEQ ID NO: 367 - DNA, 50 bp, Unknown
  Description of Unknown: Dog/Human CpG sequence
gctcactccgatgggcttgctgaccccaacaggccggctgatggtgaccg

SEQ ID NO: 368 - DNA, 50 bp, Unknown
  Description of Unknown: Dog/Human CpG sequence
ctagctcttgctcagagttgaggccttggtcgggtatgtgtgcgtgcgcg

SEQ ID NO: 369 - DNA, 50 bp, Unknown
  Description of Unknown: Dog/Human CpG sequence
aggaatgcgctgaagcttgtaatcagctttgtgaagccattgagtgcacg

SEQ ID NO: 370 - DNA, 50 bp, Unknown
  Description of Unknown: Dog/Human CpG sequence
cgcagacaatgcctcagtgataagcatgcagattgtgcacctagttcaga

SEQ ID NO: 371 - DNA, 50 bp, Unknown
  Description of Unknown: Dog/Human CpG sequence
aagagatgaggctcacgttgcacggatgacatcactagcttttggctgcg

SEQ ID NO: 372 - DNA, 50 bp, Unknown
  Description of Unknown: Dog/Human CpG sequence
cgagaagaagtggcggcacaagtcgagcgcccccaaacgctcgatccccc

SEQ ID NO: 373 - DNA, 50 bp, Unknown
  Description of Unknown: Dog/Human CpG sequence
cgcctcggaccaatccccagtgattatgcaagacagcggaccaatcagct

SEQ ID NO: 374 - DNA, 50 bp, Unknown
  Description of Unknown: Dog/Human CpG sequence
ttctgtcccaatgtgcccatcatcctggtggccaacaaaaaagacctgcg

SEQ ID NO: 375 - DNA, 50 bp, Unknown
  Description of Unknown: Dog/Human CpG sequence
cggcgggaccattaatcctcagcatggggtattgtcctccagacagttac

SEQ ID NO: 376 - DNA, 50 bp, Unknown
  Description of Unknown: Dog/Human CpG sequence
tgtacacaggctaagtggccccactccaggacaagtggccctctaagtcg

SEQ ID NO: 377 - DNA, 50 bp, Unknown
  Description of Unknown: Dog/Human CpG sequence
cgctcaggaagccttctgtttagaaaactggtgtgtgcgttttttgatga

SEQ ID NO: 378 - DNA, 50 bp, Unknown
  Description of Unknown: Dog/Human CpG sequence
aacaaaacataaacgatcaataagtcgatggcacttcacatgattaaccg

SEQ ID NO: 379 - DNA, 50 bp, Unknown
  Description of Unknown: Dog/Human CpG sequence
cacgagtaaattattcatgattttacgagctctttagctccattgaatcg

SEQ ID NO: 380 - DNA, 50 bp, Unknown
  Description of Unknown: Dog/Human CpG sequence
cgcttgcgagcaagggagtgtatatactaaatgccacactgtatgtttct

SEQ ID NO: 381 - DNA, 50 bp, Unknown
  Description of Unknown: Dog/Human CpG sequence
cgggtttgcctacaggtagattagattaattattactatgtaatgcaagt

SEQ ID NO: 382 - DNA, 50 bp, Unknown
  Description of Unknown: Dog/Human CpG sequence
cgctttcacagtcaatgaaaccacctgaatagatgaaagccagacagctt

SEQ ID NO: 383 - DNA, 50 bp, Unknown
  Description of Unknown: Dog/Human CpG sequence
cattttcccagacaatggtgactacaaagaggcttcaaaatagaacatcg

SEQ ID NO: 384 - DNA, 50 bp, Unknown
  Description of Unknown: Dog/Human CpG sequence
gtcttgagagactggatacataaactggctccagccagctgcggctgtcg

SEQ ID NO: 385 - DNA, 50 bp, Unknown
  Description of Unknown: Dog/Human CpG sequence
caatagtgggggtggctgcgtgggtcgccatggggacggggctgttcccg

SEQ ID NO: 386 - DNA, 50 bp, Unknown
  Description of Unknown: Dog/Human CpG sequence
cggcagcgatcagccggagacatgcaggggagccatcttgccacttaccc

SEQ ID NO: 387 - DNA, 50 bp, Unknown
  Description of Unknown: Dog/Human CpG sequence
ccaagatttaaaagctcatcgccggccttgtaatgcagtaactgattgcg

SEQ ID NO: 388 - DNA, 50 bp, Unknown
  Description of Unknown: Dog/Human CpG sequence
ttaacatgcagcctgcaaatcagtaactttgcagctcagactcgcagacg

SEQ ID NO: 389 - DNA, 50 bp, Unknown
  Description of Unknown: Dog/Human CpG sequence
tggctagtgagatcaggtaaaacctgatgcatgctgcatgctgctgtgcg

SEQ ID NO: 390 - DNA, 50 bp, Unknown
  Description of Unknown: Dog/Human CpG sequence
acagtttggtcggatctttgagctgactgtcatcaaggacaagtacaccg

SEQ ID NO: 391 - DNA, 50 bp, Unknown
  Description of Unknown: Dog/Human CpG sequence
gcctgtttctattaagcagttccatggccctcggcgtgggtggtctgccg

SEQ ID NO: 392 - DNA, 50 bp, Unknown
  Description of Unknown: Dog/Human CpG sequence
cgcgaaccagaaagaaaagtatgaggctgacctaaagaaggagattaaga

SEQ ID NO: 393 - DNA, 50 bp, Unknown
  Description of Unknown: Dog/Human CpG sequence
cgacccgtttgcatccatgcatagtaagtaggcggcgagctcgcttctct

SEQ ID NO: 394 - DNA, 50 bp, Unknown
  Description of Unknown: Dog/Human CpG sequence
cgcccttggtctgttccattggcgcacgttgccaaagatggtcatttgcg

SEQ ID NO: 395 - DNA, 50 bp, Unknown
  Description of Unknown: Dog/Human CpG sequence
gaaaatgccaccagatggcgggttaggattgcagctccgttgaaggcgcg

SEQ ID NO: 396 - DNA, 50 bp, Unknown
  Description of Unknown: Dog/Human CpG sequence
cgctaccaacaacaattaaggcatcaaaagtgttccatgcatcagtgaaa

SEQ ID NO: 397 - DNA, 50 bp, Unknown
  Description of Unknown: Dog/Human CpG sequence
cgtcaggagtctggatggacagagacacacaaaacatgggcagggcgagc

SEQ ID NO: 398 - DNA, 50 bp, Unknown
  Description of Unknown: Dog/Human CpG sequence
cgcgtgcctgtgctggtgtcttagagcaagagcctccctgagctttcgga

SEQ ID NO: 399 - DNA, 50 bp, Unknown
  Description of Unknown: Dog/Human CpG sequence
cgctgacatcaccatccggggactccgggcccttccccaaagttaaccct

SEQ ID NO: 400 - DNA, 50 bp, Unknown
  Description of Unknown: Dog/Human CpG sequence
cgcccaagggcaattttaattgtctaacccggcccgatttcctaagaggc

SEQ ID NO: 401 - DNA, 50 bp, Unknown
  Description of Unknown: Dog/Human CpG sequence
cggtccaacacagttgatatacatttgtttacctgttatagttgcaagtt

SEQ ID NO: 402 - DNA, 50 bp, Unknown
  Description of Unknown: Dog/Human CpG sequence
cgggcaaaaagcaggaacttgtcaagacctgatcaaaggccgaaaggggt

SEQ ID NO: 403 - DNA, 50 bp, Unknown
  Description of Unknown: Dog/Human CpG sequence
cgcatccgaatatgaggcatttttatgtgaaaatggaaaacccggccaag

SEQ ID NO: 404 - DNA, 50 bp, Unknown
  Description of Unknown: Dog/Human CpG sequence
ctacgaaagcagcctagcctccgcatcaatattcataaggcagtttgacg

SEQ ID NO: 405 - DNA, 50 bp, Unknown
  Description of Unknown: Dog/Human CpG sequence
gaactcactattcgggattcatgctggacatgtcactgcagctgccgccg

SEQ ID NO: 406 - DNA, 50 bp, Unknown
  Description of Unknown: Dog/Human CpG sequence
cgggacagcatgatgattgaagaactccttgtgccatccaaagagcaggt

SEQ ID NO: 407 - DNA, 50 bp, Unknown
  Description of Unknown: Dog/Human CpG sequence
cgggcccagccgacgccagaaggtcccaacagcagctgcccaaacagttt

SEQ ID NO: 408 - DNA, 50 bp, Unknown
  Description of Unknown: Dog/Human CpG sequence
ctcctacctcttccaagcagcatggtgtgaatgtcagtgtgaatgcatcg

SEQ ID NO: 409 - DNA, 50 bp, Unknown
  Description of Unknown: Dog/Human CpG sequence
cggctcagctagcagagctaataggcttctaattaatttccagaagattg

SEQ ID NO: 410 - DNA, 50 bp, Unknown
  Description of Unknown: Dog/Human CpG sequence
gaagtctttcttcagcggctttcttctcaccctgttctcagtaaagatcg

SEQ ID NO: 411 - DNA, 50 bp, Unknown
  Description of Unknown: Dog/Human CpG sequence
cggcgtcgttaaagagcaattagatggaaattaagccgagaacaagtatt

SEQ ID NO: 412 - DNA, 50 bp, Unknown
  Description of Unknown: Dog/Human CpG sequence
agatacagcgagctggtgaatggggcaccatctgcgatgatgacttcacg

SEQ ID NO: 413 - DNA, 50 bp, Unknown
  Description of Unknown: Dog/Human CpG sequence
gcatagtttttagcataacatcttgactcctcgataattatatccgttcg

SEQ ID NO: 414 - DNA, 50 bp, Unknown
  Description of Unknown: Dog/Human CpG sequence
cggaggctagttcctggtgggtcagcatgtacttctcacacttagctagt

SEQ ID NO: 415 - DNA, 50 bp, Unknown
  Description of Unknown: Dog/Human CpG sequence
taaatacgattttatcagctcggaatctgttgaaacacatccatctagcg

SEQ ID NO: 416 - DNA, 50 bp, Unknown
  Description of Unknown: Dog/Human CpG sequence
cttttctgaattatttatagaccggtaccagctgttttcaattcctctcg

SEQ ID NO: 417 - DNA, 50 bp, Unknown
  Description of Unknown: Dog/Human CpG sequence
atgtgccatcacgctgtctgttgcttgaactcctggatgtcagtgtttcg

SEQ ID NO: 418 - DNA, 50 bp, Unknown
  Description of Unknown: Dog/Human CpG sequence
agacaaatgattcgagtctgaattccatatacaccggagattgcttatcg

SEQ ID NO: 419 - DNA, 50 bp, Unknown
  Description of Unknown: Dog/Human CpG sequence
gcccccaaaccagctgtttacatacaggaatcaggtattggggcccctcg

SEQ ID NO: 420 - DNA, 50 bp, Unknown
  Description of Unknown: Dog/Human CpG sequence
cagatggtccctcctaaaggggcctacaacgtggctgtgatgtttgaccg

SEQ ID NO: 421 - DNA, 50 bp, Unknown
  Description of Unknown: Dog/Human CpG sequence
cgagtcgttgggagagagggctttgtaggttataataaaatcctttgaat

SEQ ID NO: 422 - DNA, 50 bp, Unknown
  Description of Unknown: Dog/Human CpG sequence
tgctgaagcacctggtagacaggtacaatctctactacgcctacctgccg

SEQ ID NO: 423 - DNA, 50 bp, Unknown
  Description of Unknown: Dog/Human CpG sequence
tgctgcctgtcctgagaaatttatgtcacacccactccatcatcctggcg

SEQ ID NO: 424 - DNA, 50 bp, Unknown
  Description of Unknown: Dog/Human CpG sequence
cgggccagtctcgggttctcgcttgtaaactttattgtaactcttccgcc

SEQ ID NO: 425 - DNA, 50 bp, Unknown
  Description of Unknown: Dog/Human CpG sequence
cgcaaacatatttccttggtgaaatgtcaaaaaggcagcaatcaaaatga

SEQ ID NO: 426 - DNA, 50 bp, Unknown
  Description of Unknown: Dog/Human CpG sequence
acaaagagcgagtgtgggccgcggtgacttcatgcctcaccaatgtcccg

SEQ ID NO: 427 - DNA, 50 bp, Unknown
  Description of Unknown: Dog/Human CpG sequence
tttacagccctataaaagctgtagcgacgaggcaagcgctcctaccaccg

SEQ ID NO: 428 - DNA, 50 bp, Unknown
  Description of Unknown: Dog/Human CpG sequence
cgcaggcactaggttatataacagtctgaatggaaaaaggaaggtcagag

SEQ ID NO: 429 - DNA, 50 bp, Unknown
  Description of Unknown: Dog/Human CpG sequence
gaaaataagacagccattgtcctcgcacgccaaacgagggtttgatgtcg

SEQ ID NO: 430 - DNA, 50 bp, Unknown
  Description of Unknown: Dog/Human CpG sequence
cggctgatggatatgaaaaaataaattactgtggcaaaatgtaataaaca

SEQ ID NO: 431 - DNA, 50 bp, Unknown
  Description of Unknown: Dog/Human CpG sequence
gacccttaattacttgctaaattagaatggttttctgaaaatcacaagcg

SEQ ID NO: 432 - DNA, 50 bp, Unknown
  Description of Unknown: Dog/Human CpG sequence
atttcacagctgagctgtgtattgccagataaatcaaatcagggtaaacg

SEQ ID NO: 433 - DNA, 50 bp, Unknown
  Description of Unknown: Dog/Human CpG sequence
cgcctgcaagttcaaatgcgggttgtgacacccatcatcattatatcact

SEQ ID NO: 434 - DNA, 50 bp, Unknown
  Description of Unknown: Dog/Human CpG sequence
ttactgcagctaacttcatagacgtgatcatcacccggcaaattgcctcg

SEQ ID NO: 435 - DNA, 50 bp, Unknown
  Description of Unknown: Dog/Human CpG sequence
cgtgagagccagttgggagaaacaaagttgtgcaggccaagggcataaag

SEQ ID NO: 436 - DNA, 50 bp, Unknown
  Description of Unknown: Dog/Human CpG sequence
cgcagaacgtagtgtggggactgaaaaagaccgtggcaatggatgaacaa

SEQ ID NO: 437 - DNA, 50 bp, Unknown
  Description of Unknown: Dog/Human CpG sequence
cgtttccaaactgaatagtcattgggctgccagataattcagaaactatc

SEQ ID NO: 438 - DNA, 50 bp, Unknown
  Description of Unknown: Dog/Human CpG sequence
tgtttcctcgcatacattaccatcaatgcccggcctgtgagtgtgtgtcg

SEQ ID NO: 439 - DNA, 50 bp, Unknown
  Description of Unknown: Dog/Human CpG sequence
aacgtgaccatgtggattcaacagcttttaggactcaggtgagcgacccg

SEQ ID NO: 440 - DNA, 50 bp, Unknown
  Description of Unknown: Dog/Human CpG sequence
aattgtaatcaagccaggccgtctcagctggctgattaatgagacccacg

SEQ ID NO: 441 - DNA, 50 bp, Unknown
  Description of Unknown: Dog/Human CpG sequence
atccccaccatttgagagctcaccttgcagcagacagacatggtggctcg

SEQ ID NO: 442 - DNA, 50 bp, Unknown
  Description of Unknown: Dog/Human CpG sequence
gcttaagaatacgcgtagtcgaggagagtaccagcggcaggggggcagcg

SEQ ID NO: 443 - DNA, 50 bp, Unknown
  Description of Unknown: Dog/Human CpG sequence
cgccaaagcgcacggctcacaaagggagcaagtagctgccacagggaact

SEQ ID NO: 444 - DNA, 50 bp, Unknown
  Description of Unknown: Dog/Human CpG sequence
cgcacgcacctccctctgtgttgtagcaataggctgtgtagtgtcctgag

SEQ ID NO: 445 - DNA, 50 bp, Unknown
  Description of Unknown: Dog/Human CpG sequence
cactcgcagtggtagccagcttctatcaagccatctagaaatgcccatcg

SEQ ID NO: 446 - DNA, 50 bp, Unknown
  Description of Unknown: Dog/Human CpG sequence
cttccccttcgaggcgctgtctcaggggcagcagctgtgcaaggtgcgcg

SEQ ID NO: 447 - DNA, 50 bp, Unknown
  Description of Unknown: Dog/Human CpG sequence
aggggcccccgcccaggatggactggatggtgaagctggagacgccaccg

SEQ ID NO: 448 - DNA, 50 bp, Unknown
  Description of Unknown: Dog/Human CpG sequence
cattacaaaactctaatatacacacagggaaatttgatgatttgactgcg

SEQ ID NO: 449 - DNA, 50 bp, Unknown
  Description of Unknown: Dog/Human CpG sequence
cggctgggtgttatttagtgcaatatgaaatcaaatgatcctatttctca

SEQ ID NO: 450 - DNA, 50 bp, Unknown
  Description of Unknown: Dog/Human CpG sequence
cggtttaagtcatgtgattgcaaatagtaaattagtttctcgatgttttc

SEQ ID NO: 451 - DNA, 50 bp, Unknown
  Description of Unknown: Dog/Human CpG sequence
gtaccaggattatcccgggaactttgacacctcgtcccggggcagcagcg

SEQ ID NO: 452 - DNA, 50 bp, Unknown
  Description of Unknown: Dog/Human CpG sequence
ccccgggacgaggtgtcaaagttcccgggataatcctggtacatgatccg

SEQ ID NO: 453 - DNA, 50 bp, Unknown
  Description of Unknown: Dog/Human CpG sequence
cgccaggagctgcaccgcattatcaatgaccgggagatgagggacgccat

SEQ ID NO: 454 - DNA, 50 bp, Unknown
  Description of Unknown: Dog/Human CpG sequence
gcccgtctcttgtctttcctggtttatgactttcggctttgtggaatacg

SEQ ID NO: 455 - DNA, 50 bp, Unknown
  Description of Unknown: Dog/Human CpG sequence
gtaccctgtgacaattggaggcaagatcgtgggctccttgtgtgccatcg

SEQ ID NO: 456 - DNA, 50 bp, Unknown
  Description of Unknown: Dog/Human CpG sequence
gatggctttgggggccttgcttccattttccattattatgtggactaccg

SEQ ID NO: 457 - DNA, 50 bp, Unknown
  Description of Unknown: Dog/Human CpG sequence
cggtcgctaggaggcagaacaagatcaagaaagctcagcgaacttgaacc

SEQ ID NO: 458 - DNA, 50 bp, Unknown
  Description of Unknown: Dog/Human CpG sequence
ctggctggttgtacccatcagctttgcgctttcctcctacatttccaccg

SEQ ID NO: 459 - DNA, 50 bp, Unknown
  Description of Unknown: Dog/Human CpG sequence
taaagcattatctttggtacaagtacacacggcagggcattttggcttcg

SEQ ID NO: 460 - DNA, 50 bp, Unknown
  Description of Unknown: Dog/Human CpG sequence
cgaaagggaattaaccccatcaccagcccggacaccggctccagcggcag

SEQ ID NO: 461 - DNA, 50 bp, Unknown
  Description of Unknown: Dog/Human CpG sequence
cgagatggccgacagccccgagttcaccagcatccctgcctgctactggt

SEQ ID NO: 462 - DNA, 50 bp, Unknown
  Description of Unknown: Dog/Human CpG sequence
cgggagcttgttaaatgttcctcattatacatttctggtctgtttcatca

SEQ ID NO: 463 - DNA, 50 bp, Unknown
  Description of Unknown: Dog/Human CpG sequence
cggccaaatgtactgccccaaagagcaggcgcagcctccccacctctgga

SEQ ID NO: 464 - DNA, 50 bp, Unknown
  Description of Unknown: Dog/Human CpG sequence
gttttttcaaaaagacgatgtctttctccttgttgctttttagtaggtcg

SEQ ID NO: 465 - DNA, 50 bp, Unknown
  Description of Unknown: Dog/Human CpG sequence
cggctgcaaaccaggtgtttttttctgaggctgtgttgacagctgctaat

SEQ ID NO: 466 - DNA, 50 bp, Unknown
  Description of Unknown: Dog/Human CpG sequence
cgctacagtaatccagaatgtgtatttctgcagatgattaaatcaataca

SEQ ID NO: 467 - DNA, 50 bp, Unknown
  Description of Unknown: Dog/Human CpG sequence
tggggcaggcatgcggccactccatcctctgcaggagccagcagtacccg

SEQ ID NO: 468 - DNA, 50 bp, Unknown
  Description of Unknown: Dog/Human CpG sequence
cgcaacttatatctgttgtctcaaacaataggctggacaagtaagcctca

SEQ ID NO: 469 - DNA, 50 bp, Unknown
  Description of Unknown: Dog/Human CpG sequence
cgcaaccacctggagaacaaaatccatctgtctgactgaatctagttgaa

SEQ ID NO: 470 - DNA, 50 bp, Unknown
  Description of Unknown: Dog/Human CpG sequence
cgcccgggcagatctgcaagttatttgaatgtattattccagtacctgtc

SEQ ID NO: 471 - DNA, 50 bp, Unknown
  Description of Unknown: Dog/Human CpG sequence
attcagctttggcaccttggtattaaatttgcatagcaggtcacgcgtcg

SEQ ID NO: 472 - DNA, 50 bp, Unknown
  Description of Unknown: Dog/Human CpG sequence
cgacgaccccaccaagcagaccaagttcaagggcatgaagagctacatct

SEQ ID NO: 473 - DNA, 50 bp, Unknown
  Description of Unknown: Dog/Human CpG sequence
gctggtgctgaggctgaggctgggcgtcctcatgatcgccttgactagcg

SEQ ID NO: 474 - DNA, 50 bp, Unknown
  Description of Unknown: Dog/Human CpG sequence
actgcattattccccaggcggtgtgcagtctgtgtaaacaggcttttccg

SEQ ID NO: 475 - DNA, 50 bp, Unknown
  Description of Unknown: Dog/Human CpG sequence
cgaggcccccagcagtgccatctctctcagggacgtcaatgtgtctgcct

SEQ ID NO: 476 - DNA, 50 bp, Unknown
  Description of Unknown: Dog/Human CpG sequence
gcactttccgagggcggctgtacttgactgagctgcagaacaggcacacg

SEQ ID NO: 477 - DNA, 50 bp, Unknown
  Description of Unknown: Dog/Human CpG sequence
cgccatcgaaatgactggagcctaaatccagcgccttagaccactcggcc

SEQ ID NO: 478 - DNA, 50 bp, Unknown
  Description of Unknown: Dog/Human CpG sequence
ttatggggaaataactgtacacttctagcatattcctggcctccctggcg

SEQ ID NO: 479 - DNA, 50 bp, Unknown
  Description of Unknown: Dog/Human CpG sequence
cgcatgccaacaactcgtccatcgagctggagaagctggccaagaagcaa

SEQ ID NO: 480 - DNA, 50 bp, Unknown
  Description of Unknown: Dog/Human CpG sequence
cgcccgccgacctgcacctgtctgtgaagtatgtagggtgggcagaagcc

SEQ ID NO: 481 - DNA, 50 bp, Unknown
  Description of Unknown: Dog/Human CpG sequence
cggggattggagtagacggtcaaattaacgtccatagctccattctgtcc

SEQ ID NO: 482 - DNA, 50 bp, Unknown
  Description of Unknown: Dog/Human CpG sequence
cgggaagagaataatgtacttttttattaaaatggaaatgacacactgct

SEQ ID NO: 483 - DNA, 50 bp, Unknown
  Description of Unknown: Dog/Human CpG sequence
tattaactattctgtgctgtcctcttggatgataagatccggagtcatcg

SEQ ID NO: 484 - DNA, 50 bp, Unknown
  Description of Unknown: Dog/Human CpG sequence
gcgggcggtgtttttccccctttaatccgaattcacgggttttcccttcg

SEQ ID NO: 485 - DNA, 50 bp, Unknown
  Description of Unknown: Dog/Human CpG sequence
cgccccctcaccctggggctccccacccgccccaggtgatgctgctgcac

SEQ ID NO: 486 - DNA, 50 bp, Unknown
  Description of Unknown: Dog/Human CpG sequence
tgagcagcttacgacactcagtgagcagtaggtgcctgtgcaagctcgcg

SEQ ID NO: 487 - DNA, 50 bp, Unknown
  Description of Unknown: Dog/Human CpG sequence
tgcggtaggtcaggttgtccaccttgagggaggtcataccctccacatcg

SEQ ID NO: 488 - DNA, 50 bp, Unknown
  Description of Unknown: Dog/Human CpG sequence
aataaattatcgctgacactccagtatttaattatgcagctgtcagagcg

SEQ ID NO: 489 - DNA, 50 bp, Unknown
  Description of Unknown: Dog/Human CpG sequence
ggagtcggagctggcgctcttccagatgtccgtgctgtggctggagcacg

SEQ ID NO: 490 - DNA, 50 bp, Unknown
  Description of Unknown: Dog/Human CpG sequence
cattctcttcacagtaaacctaagaacacttgtaacaattgcccacagcg

SEQ ID NO: 491 - DNA, 50 bp, Unknown
  Description of Unknown: Dog/Human CpG sequence
agacgggcccaagcccccctttgaaagtgggcatgaatcacaaagccccg

SEQ ID NO: 492 - DNA, 50 bp, Unknown
  Description of Unknown: Dog/Human CpG sequence
ctacaggtgcatcacctgcgctgtccttgctggtggtcactataagagcg

SEQ ID NO: 493 - DNA, 50 bp, Unknown
  Description of Unknown: Dog/Human CpG sequence
cgctgaagtcccacaccatggcccacggcatcttgggcaggtcgcacagg

SEQ ID NO: 494 - DNA, 50 bp, Unknown
  Description of Unknown: Dog/Human CpG sequence
gtctgccgcagataatggggaatgccaccattcctggagccatatgagcg

SEQ ID NO: 495 - DNA, 50 bp, Unknown
  Description of Unknown: Dog/Human CpG sequence
atgatctcctaaatagtgtctgtaaataaagtcgcctctaatggcaggcg

SEQ ID NO: 496 - DNA, 50 bp, Unknown
  Description of Unknown: Dog/Human CpG sequence
cgcagggcggcggcaacagcagacagaccctgctcagcagccaccacaaa

SEQ ID NO: 497 - DNA, 50 bp, Unknown
  Description of Unknown: Dog/Human CpG sequence
cgggaacagctggagatgacagatcaatggttcaatactctcaacagcat

SEQ ID NO: 498 - DNA, 50 bp, Unknown
  Description of Unknown: Dog/Human CpG sequence
taccatttctttcccattttttggccagaaggtcatgtgcaaattgaacg

SEQ ID NO: 499 - DNA, 50 bp, Unknown
  Description of Unknown: Dog/Human CpG sequence
ctgcctccctcataaaagcgggcatctgtggaaagcaggtttagttatcg

SEQ ID NO: 500 - DNA, 50 bp, Unknown
  Description of Unknown: Dog/Human CpG sequence
tgtcagtcttttgtatttcagcagctggattcattgctaccatggtaacg

SEQ ID NO: 501 - DNA, 50 bp, Unknown
  Description of Unknown: Dog/Human CpG sequence
acttcctcattggtatgccagcatcatggatcatgtcagccacagcagcg

SEQ ID NO: 502 - DNA, 50 bp, Unknown
  Description of Unknown: Dog/Human CpG sequence
gtgacaagaatgtccagctcctccttggagaacttgggcttcctcttacg

SEQ ID NO: 503 - DNA, 50 bp, Unknown
  Description of Unknown: Dog/Human CpG sequence
cgcctccaccgaggaggggataatgcacttgaagaccgcaacattgcctc

SEQ ID NO: 504 - DNA, 50 bp, Unknown
  Description of Unknown: Dog/Human CpG sequence
tgctgtctcggacaccctgctgggctcttaccctgttgccctggtaaccg

SEQ ID NO: 505 - DNA, 50 bp, Unknown
  Description of Unknown: Dog/Human CpG sequence
cgccagcattgtgtatagttaccatggaaagagtgagtcaagtgaagggc

SEQ ID NO: 506 - DNA, 50 bp, Unknown
  Description of Unknown: Dog/Human CpG sequence
cggtccctgatacagtagtctggagaattctcaaaatacacgaggtcatt

SEQ ID NO: 507 - DNA, 50 bp, Unknown
  Description of Unknown: Dog/Human CpG sequence
cgtcggaaacagccggaaaataaacaccctgatgactaaacggtttctcc

SEQ ID NO: 508 - DNA, 50 bp, Unknown
  Description of Unknown: Dog/Human CpG sequence
cgtggaactctccaccaagggtcagaagaaggggcctggcctggctgtcc

SEQ ID NO: 509 - DNA, 50 bp, Unknown
  Description of Unknown: Dog/Human CpG sequence
cgggagcccagggaccgctccatcactggcagccatggagcccgagcatt

SEQ ID NO: 510 - DNA, 50 bp, Unknown
  Description of Unknown: Dog/Human CpG sequence
ctggatgatgtcgttgttgttctcgccatttggggacagggtttgggtcg

SEQ ID NO: 511 - DNA, 50 bp, Unknown
  Description of Unknown: Dog/Human CpG sequence
cgttggactcctgggcaatcctaattgcctcctgcagggcgagctctgcc

SEQ ID NO: 512 - DNA, 50 bp, Unknown
  Description of Unknown: Dog/Human CpG sequence
cgtgttctgcagtgcaaagggacttcccatggcaacaacaaactcccctt

SEQ ID NO: 513 - DNA, 50 bp, Unknown
  Description of Unknown: Dog/Human CpG sequence
gggagtgaccttcagaaaatatatgaagcaaatgccaaaaggttttctcg

SEQ ID NO: 514 - DNA, 50 bp, Unknown
  Description of Unknown: Dog/Human CpG sequence
cctgtacaatagggttgtgcaggttcttctgaactgggccgggactgtcg

SEQ ID NO: 515 - DNA, 50 bp, Unknown
  Description of Unknown: Dog/Human CpG sequence
cgccagcgccaataaataagcccattaaccggcgaagttcgagtttacga

SEQ ID NO: 516 - DNA, 50 bp, Unknown
  Description of Unknown: Dog/Human CpG sequence
ggacttgtcagaattcattattgactgcgaaagtcaccaccctctttccg

SEQ ID NO: 517 - DNA, 50 bp, Unknown
  Description of Unknown: Dog/Human CpG sequence
cgccgaggccgagtgcctggccgagagccaccagcacctctccaaggagt

SEQ ID NO: 518 - DNA, 50 bp, Unknown
  Description of Unknown: Dog/Human CpG sequence
gctttctcaggtttctgctgatcttgcagcgcccagaaatggaccgagcg

SEQ ID NO: 519 - DNA, 50 bp, Unknown
  Description of Unknown: Dog/Human CpG sequence
cgccgtcagcacaacaaacgcacaacacaaggagaaacttggtgtccagg

SEQ ID NO: 520 - DNA, 50 bp, Unknown
  Description of Unknown: Dog/Human CpG sequence
gcagaattagaaacaatcagggagctgcctaattactgtcaattagagcg

SEQ ID NO: 521 - DNA, 50 bp, Unknown
  Description of Unknown: Dog/Human CpG sequence
cggctcaagttcaacgagttcgtgaacacggtgcccaccatcggcttcaa

SEQ ID NO: 522 - DNA, 50 bp, Unknown
  Description of Unknown: Dog/Human CpG sequence
cagatactagtcaatatcaaatcatgtagatggcggcattttaggcctcg

SEQ ID NO: 523 - DNA, 50 bp, Unknown
  Description of Unknown: Dog/Human CpG sequence
aaatggaaacaattttcattcattgcaataactcactgttctggagatcg

SEQ ID NO: 524 - DNA, 50 bp, Unknown
  Description of Unknown: Dog/Human CpG sequence
tgtttccatagctatccatataaaagagcccttggaatgaggctgactcg

SEQ ID NO: 525 - DNA, 50 bp, Unknown
  Description of Unknown: Dog/Human CpG sequence
cggggttgtaaaaaatacagatgccaaattaactggctgtggcacttggc

SEQ ID NO: 526 - DNA, 50 bp, Unknown
  Description of Unknown: Dog/Human CpG sequence
taccttcagaatctcatacatgtaaaatcgaatatcatagtctgttaacg

SEQ ID NO: 527 - DNA, 50 bp, Unknown
  Description of Unknown: Dog/Human CpG sequence
gatgccatcccaggcaaaaaaggcactcgtgttctcatttggaacatccg

SEQ ID NO: 528 - DNA, 50 bp, Unknown
  Description of Unknown: Dog/Human CpG sequence
gagcagcttgaaaagcaggtcgtacgtcttcttcgccattgggaggagcg

SEQ ID NO: 529 - DNA, 50 bp, Unknown
  Description of Unknown: Dog/Human CpG sequence
gccttttgttcccagccagaagtttgcatgccgggaccgtgacagctgcg

SEQ ID NO: 530 - DNA, 50 bp, Unknown
  Description of Unknown: Dog/Human CpG sequence
tggagcagtggtgcctcctcaaggagcggctgggcttctccctgcactcg

SEQ ID NO: 531 - DNA, 50 bp, Unknown
  Description of Unknown: Dog/Human CpG sequence
agtctgttgttgtttatgccgcagcgcataaaagctgttagcattttacg

SEQ ID NO: 532 - DNA, 50 bp, Unknown
  Description of Unknown: Dog/Human CpG sequence
cgcccaatcgccgtatactccccgcatttaacttggatgacattttgatt

SEQ ID NO: 533 - DNA, 50 bp, Unknown
  Description of Unknown: Dog/Human CpG sequence
gttgtgcattcagctttttaatgtgttcaaagagcagctctgacgcatcg

SEQ ID NO: 534 - DNA, 50 bp, Unknown
  Description of Unknown: Dog/Human CpG sequence
cggcgctgggtcttttttcatagaaaaaggtattaacacataagcatctg

SEQ ID NO: 535 - DNA, 50 bp, Unknown
  Description of Unknown: Dog/Human CpG sequence
cggcagctggccaaactgctctacgtccacatgttgggctaccccgccca

SEQ ID NO: 536 - DNA, 50 bp, Unknown
  Description of Unknown: Dog/Human CpG sequence
cgcaaaggttaccggatccaggctgacaaagagagagactccatgaaggt

SEQ ID NO: 537 - DNA, 50 bp, Unknown
  Description of Unknown: Dog/Human CpG sequence
cgagccgagggagccccttatcccggtgacagaatgggacaagctgggaa

SEQ ID NO: 538 - DNA, 50 bp, Unknown
  Description of Unknown: Dog/Human CpG sequence
cgcctcccgcgcctgccattagaggcgactttatttacagacactattta

SEQ ID NO: 539 - DNA, 50 bp, Unknown
  Description of Unknown: Dog/Human CpG sequence
cgatggtgctttgcaaggatgtatttatgttataatggccaacatttggt

SEQ ID NO: 540 - DNA, 50 bp, Unknown
  Description of Unknown: Dog/Human CpG sequence
gtaaatggagttgtctctttaaagtgccccggtcagttcaccacacgtcg

SEQ ID NO: 541 - DNA, 50 bp, Unknown
  Description of Unknown: Dog/Human CpG sequence
cgcggcgccatgggctgaaaactcaaccgagatggaatctcccagtctga

SEQ ID NO: 542 - DNA, 50 bp, Unknown
  Description of Unknown: Dog/Human CpG sequence
cgatcagatgagttcctcttagtgcaggtcaaaaaggctagttagcagga

SEQ ID NO: 543 - DNA, 50 bp, Unknown
  Description of Unknown: Dog/Human CpG sequence
atcactggacaaggtaacaagggccggagcaacccgcttgtcaactaacg

SEQ ID NO: 544 - DNA, 50 bp, Unknown
  Description of Unknown: Dog/Human CpG sequence
caacactgttttgcccgatgtaattgcagtttccatataaataattcacg

SEQ ID NO: 545 - DNA, 50 bp, Unknown
  Description of Unknown: Dog/Human CpG sequence
tggtgtctctggccggggactggaatttcatctgaatgactgcccctgcg

SEQ ID NO: 546 - DNA, 50 bp, Unknown
  Description of Unknown: Dog/Human CpG sequence
cggactctacctgtggctcaggcataccaggacaacctgtacaggcagct

SEQ ID NO: 547 - DNA, 50 bp, Unknown
  Description of Unknown: Dog/Human CpG sequence
cgtgcaaggcaaccacactgactgtgtactcagaacccggtctgaggcct

SEQ ID NO: 548 - DNA, 50 bp, Unknown
  Description of Unknown: Dog/Human CpG sequence
ctgaatcaagccttctagcctccccgtgtgacgagtgcaataaggtaacg

SEQ ID NO: 549 - DNA, 50 bp, Unknown
  Description of Unknown: Dog/Human CpG sequence
cgcatgcgagagctctgtgcgctttacaggacctctggaagcaactactc

SEQ ID NO: 550 - DNA, 50 bp, Unknown
  Description of Unknown: Dog/Human CpG sequence
cggtgacacgatttctaatgagctgctcagagtgccagaaaagaatgcat

SEQ ID NO: 551 - DNA, 50 bp, Unknown
  Description of Unknown: Dog/Human CpG sequence
tgctttcaattcatactgccagctctacctcatgccattgaccttttacg

SEQ ID NO: 552 - DNA, 50 bp, Unknown
  Description of Unknown: Dog/Human CpG sequence
atgggtcaccgacccgcgggtggaatgggcggcctggggttactgggacg

SEQ ID NO: 553 - DNA, 50 bp, Unknown
  Description of Unknown: Dog/Human CpG sequence
cggggcctatgtctatcccccgccagtcgccaatggaatgtacccctgcc

SEQ ID NO: 554 - DNA, 50 bp, Unknown
  Description of Unknown: Dog/Human CpG sequence
cgtgtccctactggacttttcaagggtcaaagagcaatgcttcaattaat

SEQ ID NO: 555 - DNA, 50 bp, Unknown
  Description of Unknown: Dog/Human CpG sequence
cggcacggcaacctttgcaccacccactgcaccttaaaaagggggaatga

SEQ ID NO: 556 - DNA, 50 bp, Unknown
  Description of Unknown: Dog/Human CpG sequence
cacatctggtttagctttagacattttctgggattttgccagcagctacg

SEQ ID NO: 557 - DNA, 50 bp, Unknown
  Description of Unknown: Dog/Human CpG sequence
cggctcagagctaatattatggcaaagtagtaattatttcaacagtaaac

SEQ ID NO: 558 - DNA, 50 bp, Unknown
  Description of Unknown: Dog/Human CpG sequence
ctactaggcctgtcatttcagcatccttccatcataacattgtggcaccg

SEQ ID NO: 559 - DNA, 50 bp, Unknown
  Description of Unknown: Dog/Human CpG sequence
gtaaccttgtggcgtatttaatgtaaataaggcagttatgttgccaatcg

SEQ ID NO: 560 - DNA, 50 bp, Unknown
  Description of Unknown: Dog/Human CpG sequence
cagtcttagaatgagtagcaatatccacgcgaaccatctcagcctagacg

SEQ ID NO: 561 - DNA, 50 bp, Unknown
  Description of Unknown: Dog/Human CpG sequence
cgcgcaccaagaccgtcctgacattactgttttatgaccttgacttattg

SEQ ID NO: 562 - DNA, 50 bp, Unknown
  Description of Unknown: Dog/Human CpG sequence
cccggttgtttgcagaaaatttacagctgagtaataaaagtttacgatcg

SEQ ID NO: 563 - DNA, 50 bp, Unknown
  Description of Unknown: Dog/Human CpG sequence
ggggaataatgccgttattcctcggctctcagttaatgaataccctaacg

SEQ ID NO: 564 - DNA, 50 bp, Unknown
  Description of Unknown: Dog/Human CpG sequence
cggccatgacattaaaagaggggaatgtgttttggccaaaggaacccaca

SEQ ID NO: 565 - DNA, 50 bp, Unknown
  Description of Unknown: Dog/Human CpG sequence
cggctgtggaatggccgccaaaatcccagctgtgctgccagaacctaatc

SEQ ID NO: 566 - DNA, 50 bp, Unknown
  Description of Unknown: Dog/Human CpG sequence
tggagccatgtgcggcgtggagtccccgcggtgggagaggtactgcgacg

SEQ ID NO: 567 - DNA, 50 bp, Unknown
  Description of Unknown: Dog/Human CpG sequence
cggactttccagccatctccagctgtgagattattatagtttttgcaaac

SEQ ID NO: 568 - DNA, 50 bp, Unknown
  Description of Unknown: Dog/Human CpG sequence
cggagatctgtgattttcattaagatctttggaaacatgtgaggcttgct

SEQ ID NO: 569 - DNA, 50 bp, Unknown
  Description of Unknown: Dog/Human CpG sequence
cgtgcacacacagctcctaattaggggttgctgtgcagtaaacaaaaatg

SEQ ID NO: 570 - DNA, 50 bp, Unknown
  Description of Unknown: Dog/Human CpG sequence
ccccaagtgtggaaggtggttcttagctgtcaattcccttttgttattcg

SEQ ID NO: 571 - DNA, 50 bp, Unknown
  Description of Unknown: Dog/Human CpG sequence
ccagagtggaagttccattcagggggctctaaggcggcaaccctccatcg

SEQ ID NO: 572 - DNA, 50 bp, Unknown
  Description of Unknown: Dog/Human CpG sequence
gcagcacggctccgcggactttttttcaaactcccatcaatgagacttcg

SEQ ID NO: 573 - DNA, 50 bp, Unknown
  Description of Unknown: Dog/Human CpG sequence
ccgctcccccgtctcttcaaaatggatgaatcaaaccagccgaaaatgcg

SEQ ID NO: 574 - DNA, 50 bp, Unknown
  Description of Unknown: Dog/Human CpG sequence
cggatgctcaacctcactgaccggcaagtcaaaatctggttccagaatcg

SEQ ID NO: 575 - DNA, 50 bp, Unknown
  Description of Unknown: Dog/Human CpG sequence
cgcgctgcagatcttccccgaggtggccgcccaggaggagatcctcagca

SEQ ID NO: 576 - DNA, 50 bp, Unknown
  Description of Unknown: Dog/Human CpG sequence
cagcagccccgcagcagggagctgatgttgtagatgggctggccctggcg

SEQ ID NO: 577 - DNA, 50 bp, Unknown
  Description of Unknown: Dog/Human CpG sequence
acgccttctacctggagaacctgcacttcaccatcgagggcaaggacacg

SEQ ID NO: 578 - DNA, 50 bp, Unknown
  Description of Unknown: Dog/Human CpG sequence
cgggtcgggcgggcgaagccatttccaatctgctctctatcattttcaat

SEQ ID NO: 579 - DNA, 50 bp, Unknown
  Description of Unknown: Dog/Human CpG sequence
ttaaaattcatgaatctcttcacgaccatttgtgtaacaagattaagacg

SEQ ID NO: 580 - DNA, 50 bp, Unknown
  Description of Unknown: Dog/Human CpG sequence
cgcgaggtcaccgtaagctccttaatggactgtgaaataactttaactgc

SEQ ID NO: 581 - DNA, 50 bp, Unknown
  Description of Unknown: Dog/Human CpG sequence
aagtatatgtgacctaaaaaggcattgctcattctgacacatatacgacg

SEQ ID NO: 582 - DNA, 50 bp, Unknown
  Description of Unknown: Dog/Human CpG sequence
cggcataacaactatttgagggtttaattagaacatctgcaattaaggga

SEQ ID NO: 583 - DNA, 50 bp, Unknown
  Description of Unknown: Dog/Human CpG sequence
gcttggagagttcgcaatagcctcttttcccacaagctggaccacacacg

SEQ ID NO: 584 - DNA, 50 bp, Unknown
  Description of Unknown: Dog/Human CpG sequence
cgcccggcccagaaaggtacaataactgtatattttaacttaatggtttt

SEQ ID NO: 585 - DNA, 50 bp, Unknown
  Description of Unknown: Dog/Human CpG sequence
ccatttctggattatatttcagctgtaacttttaagtctaattatttgcg

SEQ ID NO: 586 - DNA, 50 bp, Unknown
  Description of Unknown: Dog/Human CpG sequence
tcattctgtatgcttgactattttgtttttaatttttcttccctttcccg

SEQ ID NO: 587 - DNA, 50 bp, Unknown
  Description of Unknown: Dog/Human CpG sequence
cggcagaaataaatccattcatttgatcatgtagtcattgagggcgatac

SEQ ID NO: 588 - DNA, 50 bp, Unknown
  Description of Unknown: Dog/Human CpG sequence
gctggagcctctgattgggtttcggagtccggtactggagccaatcagcg

SEQ ID NO: 589 - DNA, 50 bp, Unknown
  Description of Unknown: Dog/Human CpG sequence
cggggggacgagcaggcaacaaatccaggcctccgacattaccagaatgt

SEQ ID NO: 590 - DNA, 50 bp, Unknown
  Description of Unknown: Dog/Human CpG sequence
cgtcaaaattcaatcactgggggttttgcatcagccgggctacttatttg

SEQ ID NO: 591 - DNA, 50 bp, Unknown
  Description of Unknown: Dog/Human CpG sequence
cgagctgacttgcaggcatgagagatcatcaagaaagataaagaaatagg

SEQ ID NO: 592 - DNA, 50 bp, Unknown
  Description of Unknown: Dog/Human CpG sequence
cggagaaagcaccaattgaattagttgcctatttagtatccaaagcgcca

SEQ ID NO: 593 - DNA, 50 bp, Unknown
  Description of Unknown: Dog/Human CpG sequence
cgctaagctcagcttgtttttttcctctgctcaacagttctcctgccacg

SEQ ID NO: 594 - DNA, 50 bp, Unknown
  Description of Unknown: Dog/Human CpG sequence
ccagaaaataataaaccttcctggtggggtgcagggagccaaggcattcg

SEQ ID NO: 595 - DNA, 50 bp, Unknown
  Description of Unknown: Dog/Human CpG sequence
ctgcagcctgcaaaacgaatttggtgctctgaatgcactggtcttggtcg

SEQ ID NO: 596 - DNA, 50 bp, Unknown
  Description of Unknown: Dog/Human CpG sequence
ttacgacccagcaagaggccgagctggtacaatatcctgactgtaaatcg

SEQ ID NO: 597 - DNA, 50 bp, Unknown
  Description of Unknown: Dog/Human CpG sequence
ggtttctccgaaagcttacgatgcaatttccccctccaaaaaaagaatcg

SEQ ID NO: 598 - DNA, 50 bp, Unknown
  Description of Unknown: Dog/Human CpG sequence
cgctgcattgggatacagatccatcagttcttcagcttcactcagattcc

SEQ ID NO: 599 - DNA, 50 bp, Unknown
  Description of Unknown: Dog/Human CpG sequence
cggcatgctccgtgctggggaaatgagatgcacatttaaatctcatccat

SEQ ID NO: 600 - DNA, 50 bp, Unknown
  Description of Unknown: Dog/Human CpG sequence
cggccgctgcccccctgccgctggtactctcctcgactacgcgtattctt

SEQ ID NO: 601 - DNA, 50 bp, Unknown
  Description of Unknown: Dog/Human CpG sequence
cggcacactgggtcccgaggagttcaaagcctgcctcatcagcttgggtt

SEQ ID NO: 602 - DNA, 50 bp, Unknown
  Description of Unknown: Dog/Human CpG sequence
acttgtaccaaagataatgctttatgtgagaatgccagatccattccacg

SEQ ID NO: 603 - DNA, 50 bp, Unknown
  Description of Unknown: Dog/Human CpG sequence
ctctgtttgaccaagcggccaaggtaaagatcctggaggtgatgcctgcg

SEQ ID NO: 604 - DNA, 50 bp, Unknown
  Description of Unknown: Dog/Human CpG sequence
cggatttacgagtgcaaaacatgtggcgccatgttcaccaactctggaaa

SEQ ID NO: 605 - DNA, 50 bp, Unknown
  Description of Unknown: Dog/Human CpG sequence
cgctgcttgtagcttcgtccacagtagttgcacttgtgaggtttacccac

SEQ ID NO: 606 - DNA, 50 bp, Unknown
  Description of Unknown: Dog/Human CpG sequence
acagcttcgctttctgcaaaccacctttcaaaaattttcttctggaaacg

SEQ ID NO: 607 - DNA, 50 bp, Unknown
  Description of Unknown: Dog/Human CpG sequence
cgctttcagttgggctgctcggtctaatcttatttgttttacacccatca

SEQ ID NO: 608 - DNA, 50 bp, Unknown
  Description of Unknown: Dog/Human CpG sequence
agtgcttctcgtttcagcagcacaagctacatgtctgtccaatcagaacg

SEQ ID NO: 609 - DNA, 50 bp, Unknown
  Description of Unknown: Dog/Human CpG sequence
cgatcaatagctaccaacatttatggcttagattattaatgtgaaagctg

SEQ ID NO: 610 - DNA, 50 bp, Unknown
  Description of Unknown: Dog/Human CpG sequence
cgccctaattgatagacagaaggcaaagaggaggattgtttttgaacctg

SEQ ID NO: 611 - DNA, 50 bp, Unknown
  Description of Unknown: Dog/Human CpG sequence
ctactgttgccagtatgttttcagctgtgccagaaccgagcaggtctgcg

SEQ ID NO: 612 - DNA, 50 bp, Unknown
  Description of Unknown: Dog/Human CpG sequence
accaccaacattaaggaagaatccaattgctgcatgtattctgataagcg

SEQ ID NO: 613 - DNA, 50 bp, Unknown
  Description of Unknown: Dog/Human CpG sequence
cgaatgcagctgctctttgtaattgtttgtgaaactgagttaaagggagg

SEQ ID NO: 614 - DNA, 50 bp, Unknown
  Description of Unknown: Dog/Human CpG sequence
cgctgttactgtaaatgttccctcattatctatgttatggtaggaatttg

SEQ ID NO: 615 - DNA, 50 bp, Unknown
  Description of Unknown: Dog/Human CpG sequence
cgcctttcaaacgagggcagtttgtcataaaaaacatcgtcttctgacac

SEQ ID NO: 616 - DNA, 50 bp, Unknown
  Description of Unknown: Dog/Human CpG sequence
ctgggagacatgctcgatggatgatggcttttaaaatattcctaatgtcg

SEQ ID NO: 617 - DNA, 50 bp, Unknown
  Description of Unknown: Dog/Human CpG sequence
gtgctgatttattgcagaagcctctggtcatttccatatattgaaatgcg

SEQ ID NO: 618 - DNA, 50 bp, Unknown
  Description of Unknown: Dog/Human CpG sequence
cggggaacagcactcccaggatgcagtttgtgtcaacacggccgcagcct

SEQ ID NO: 619 - DNA, 50 bp, Unknown
  Description of Unknown: Dog/Human CpG sequence
cccatgtttatcaccgagtgagatgactaattacaccttgtcaatcaccg

SEQ ID NO: 620 - DNA, 50 bp, Unknown
  Description of Unknown: Dog/Human CpG sequence
taggaaaaacgataatattccggatcttctcccagttttttcccctcacg

SEQ ID NO: 621 - DNA, 50 bp, Unknown
  Description of Unknown: Dog/Human CpG sequence
caaatgtggctgaaattgataattccaaagtgcttcatttcggctcctcg

SEQ ID NO: 622 - DNA, 50 bp, Unknown
  Description of Unknown: Dog/Human CpG sequence
ctccatgatcaacctgtcggtgcagcaggtcctgagcctctgggcccacg

SEQ ID NO: 623 - DNA, 50 bp, Unknown
  Description of Unknown: Dog/Human CpG sequence
cgcgggtttctcgaggcctgtttgttattaagatgtaaattaaatcatca

SEQ ID NO: 624 - DNA, 50 bp, Unknown
  Description of Unknown: Dog/Human CpG sequence
cgacgtgaatgaagcctcatttctggccttgaggagcttaagatgtatgt

SEQ ID NO: 625 - DNA, 50 bp, Unknown
  Description of Unknown: Dog/Human CpG sequence
aattcacgggttttcccttcgctttaatggcggccacagggaccagctcg

SEQ ID NO: 626 - DNA, 50 bp, Unknown
  Description of Unknown: Dog/Human CpG sequence
ggaaggagctgcgaaagccccccttctggtcttgcctgggattttgatcg

SEQ ID NO: 627 - DNA, 50 bp, Unknown
  Description of Unknown: Dog/Human CpG sequence
tccccggattgacaaaacaatctgggagaagtgcatgcgtgctttgcacg

SEQ ID NO: 628 - DNA, 50 bp, Unknown
  Description of Unknown: Dog/Human CpG sequence
cggcggagtgtccgggtgaaaaccaaggtaccttggatgccccctggaaa

SEQ ID NO: 629 - DNA, 50 bp, Unknown
  Description of Unknown: Dog/Human CpG sequence
cgctggagctcctacatggtgcactggaagaaccagttcgaccactacag

SEQ ID NO: 630 - DNA, 50 bp, Unknown
  Description of Unknown: Dog/Human CpG sequence
ggtcgtaaaaatcggctgtctctgtaagttatcgtatccgtaaaacttcg

SEQ ID NO: 631 - DNA, 50 bp, Unknown
  Description of Unknown: Dog/Human CpG sequence
cgcgcggtacttatacagcagtacatgcagagcaatgccgaggttgtgag

SEQ ID NO: 632 - DNA, 50 bp, Unknown
  Description of Unknown: Dog/Human CpG sequence
cgccgccttcatggaccgcctgggccaccagctggaggacatgctgctct

SEQ ID NO: 633 - DNA, 50 bp, Unknown
  Description of Unknown: Dog/Universal CpG sequence
agatgaaggacgatgtcagactcattttcagcctcattaggcagcagacg

SEQ ID NO: 634 - DNA, 50 bp, Unknown
  Description of Unknown: Dog/Universal CpG sequence
gctagtaccaactgcttgagaccagatactagtttgcattcaccagaacg

SEQ ID NO: 635 - DNA, 50 bp, Unknown
  Description of Unknown: Dog/Universal CpG sequence
cgccattcaggccaggtccattctgtcatttataaagatagtttcttctg

SEQ ID NO: 636 - DNA, 50 bp, Unknown
  Description of Unknown: Dog/Universal CpG sequence
catctttctagctgactggcaacaatctgcctttccacttccagttctcg

SEQ ID NO: 637 - DNA, 50 bp, Unknown
  Description of Unknown: Dog/Universal CpG sequence
cgcccgcattttaggatacaggaacaaacacggatgtgaaatcaagaatg

SEQ ID NO: 638 - DNA, 50 bp, Unknown
  Description of Unknown: Dog/Universal CpG sequence
caatacattctatttagagtgcattacatcacccccccggtgacgtcacg

SEQ ID NO: 639 - DNA, 50 bp, Canis lupus familiaris
cggcttgtttactcaggattgggcattagaactcaggggaggctctaatt

SEQ ID NO: 640 - DNA, 50 bp, Canis lupus familiaris
cgctcccccgccgagctggggtagctgatcactgagctgaaactaaacgt

SEQ ID NO: 641 - DNA, 50 bp, Canis lupus familiaris
tcaattttatacggtcatcagtcaggttgtgaatgcaaatacctctgtcg

SEQ ID NO: 642 - DNA, 50 bp, Canis lupus familiaris
cggctgcccaacctgctgggccacgagaccatgaaggaggtgctggagca

SEQ ID NO: 643 - DNA, 50 bp, Canis lupus familiaris
ggaaatgcaataattttgccataatgggctgtaacctcaattcgaccccg

SEQ ID NO: 644 - DNA, 50 bp, Canis lupus familiaris
accttgatttaatgtcatacaattaaggcacgcggtgaatgccaagagcg

SEQ ID NO: 645 - DNA, 50 bp, Canis lupus familiaris
cctttcattgtcacattaacaccagatgctaaaaataagcctccaaaccg

SEQ ID NO: 646 - DNA, 50 bp, Canis lupus familiaris
gaaaatgcctttaagggacaaatactgtcagactgaccaccatcatcacg

SEQ ID NO: 647 - DNA, 50 bp, Canis lupus familiaris
cggagcccacagaaccaggaaatccaggacacctcctctgagctgctcat

SEQ ID NO: 648 - DNA, 50 bp, Canis lupus familiaris
cgaagacgaatatagttaaaatgtaattaaatatgacgggctagcaggat

SEQ ID NO: 649 - DNA, 50 bp, Canis lupus familiaris
cttcctgctggtgaaccagcacagcatggtgagtgtgtccacgcccatcg

SEQ ID NO: 650 - DNA, 50 bp, Canis lupus familiaris
tgcgacctgccggtgggaactttgtctccgagtcggagcagcatggagcg

SEQ ID NO: 651 - DNA, 50 bp, Canis lupus familiaris
cgctccttttgtatctcgtgattaaataagtggggaaaatggcttgaaaa

SEQ ID NO: 652 - DNA, 50 bp, Canis lupus familiaris
cggcaagatgatatgaagtaaatcaaggtacgagtaatgaaagactgaga

SEQ ID NO: 653 - DNA, 50 bp, Canis lupus familiaris
tatgaggcaacccaatctttcctcggatggcactgttaaattttggtccg

SEQ ID NO: 654 - DNA, 50 bp, Canis lupus familiaris
ggtcgctggagaggtgaaccaaagacacttccgtgtggatttggacagcg

SEQ ID NO: 655 - DNA, 50 bp, Canis lupus familiaris
cggcatgatttggatatcatcaaacggttgttggaccagtgtattcaaga

SEQ ID NO: 656 - DNA, 50 bp, Canis lupus familiaris
ctttcgagaaatggctgggccattgtgcagaagaatgcccggaaatcccg

SEQ ID NO: 657 - DNA, 50 bp, Canis lupus familiaris
acgtacttggcatagacatccagactggctgtctccacagagatgttgcg

SEQ ID NO: 658 - DNA, 50 bp, Canis lupus familiaris
cggtccctctcacccgcctattgtgtacacagtgaaggtcataggttcaa

SEQ ID NO: 659 - DNA, 50 bp, Canis lupus familiaris
actccacatcacccaggctttggtaaatgtagctggtcgctgtatagtcg

SEQ ID NO: 660 - DNA, 50 bp, Canis lupus familiaris
cggcgctctgaggcctccccattcacccgccttggcacgctcacaatcgg

SEQ ID NO: 661 - DNA, 50 bp, Canis lupus familiaris
ggagccctgggagaaagccccaactggttggtctttccccatcccagacg

SEQ ID NO: 662 - DNA, 50 bp, Canis lupus familiaris
agttaaagtgccacagagtttgctggctgcgcttgctggttgatttaacg

SEQ ID NO: 663 - DNA, 50 bp, Canis lupus familiaris
cggcggaagacgagacaacacctggcagcagcctggaatctgatttgctt

SEQ ID NO: 664 - DNA, 50 bp, Canis lupus familiaris
cgggtattcttgggtggataatacggattacgttgttattgcttaagaat

SEQ ID NO: 665 - DNA, 50 bp, Canis lupus familiaris
accttaactcgagctcatgtgtggtaattgctttattctgcatgaactcg

SEQ ID NO: 666 - DNA, 50 bp, Canis lupus familiaris
agtttgaattccatcctacattaagacttctttcacagctatttagctcg

SEQ ID NO: 667 - DNA, 50 bp, Canis lupus familiaris
cgtctaaacaggcgccaagttgctggcaatgcgcaattatttccttgtca

SEQ ID NO: 668 - DNA, 50 bp, Canis lupus familiaris
cgacctccgggtgtttaataaccttcagaagtttcccacaaaggctcaga

SEQ ID NO: 669 - DNA, 50 bp, Canis lupus familiaris
cgggtgacagagcgtgtgttgaagctgaactctataatttgcgcttctgt

SEQ ID NO: 670 - DNA, 50 bp, Canis lupus familiaris
cgagcatgaaaattcggtttgagccggctgacaatacaatgaaaaggctt

SEQ ID NO: 671 - DNA, 50 bp, Canis lupus familiaris
cgcctctgcttgcctttgataattgtgtgctgactacacgtgtaaaaaaa

SEQ ID NO: 672 - DNA, 50 bp, Canis lupus familiaris
catttcatttcaagggctcagccactggtctgtcaaatcttcattttgcg

SEQ ID NO: 673 - DNA, 50 bp, Canis lupus familiaris
catctggaattgcgctgcgctcacggccaaggccgattgtttagtctgcg

SEQ ID NO: 674 - DNA, 50 bp, Canis lupus familiaris
cgcttttggctccttcaggaatgcgctgaagcttgtaatcagctttgtga

SEQ ID NO: 675 - DNA, 50 bp, Canis lupus familiaris
aattgactgaggggcaggtgaagctcccgccccatgcaggctcattcacg

SEQ ID NO: 676 - DNA, 50 bp, Canis lupus familiaris
cgtcgctgcgcaggtcttttttgttggccaccaggatgatgggcacattg

SEQ ID NO: 677 - DNA, 50 bp, Canis lupus familiaris
cgattgagttaatctttgaagaaaacagaaaatactgtaacaataaaggc

SEQ ID NO: 678 - DNA, 50 bp, Canis lupus familiaris
cggacgccaggaagcacagggacaggtgcaaggccttcaacacccgccgg

SEQ ID NO: 679 - DNA, 50 bp, Canis lupus familiaris
cgcctggagggatcaacacagttttttaaagcaaacataacacaagtgct

SEQ ID NO: 680 - DNA, 50 bp, Canis lupus familiaris
cgctccgccgctccatgctgctccgactcggagacaaagttcccaccggc

SEQ ID NO: 681 - DNA, 50 bp, Canis lupus familiaris
taaaatcagtccagcgcttttttctcggccccttctttattgttggtccg

SEQ ID NO: 682 - DNA, 50 bp, Canis lupus familiaris
cgggaggagagtttaattggtttagcctaaaaagcccattacgctctctg

SEQ ID NO: 683 - DNA, 50 bp, Canis lupus familiaris
gggtcaccaatgggcgcggaaagtcctcactctcatggctcgggccatcg

SEQ ID NO: 684 - DNA, 50 bp, Canis lupus familiaris
aaattacccacaaaataagaacaggaagtaattcagcacagcagaacacg

SEQ ID NO: 685 - DNA, 50 bp, Canis lupus familiaris
cgtgattacacccagatcaacgtaggcaatctggagttgagtgccaacca

SEQ ID NO: 686 - DNA, 50 bp, Canis lupus familiaris
cggaattagcccaggaatttctgctgataaacaaatgaaactctcaaagg

SEQ ID NO: 687 - DNA, 50 bp, Canis lupus familiaris
ctagggggcatttgcacatatatttgtactcaacatttcatgggaaagcg

SEQ ID NO: 688 - DNA, 50 bp, Canis lupus familiaris
cgctaaccatcactaaacagtgacagtaataacagctaattttgctggca

SEQ ID NO: 689 - DNA, 50 bp, Canis lupus familiaris
agctaagttaacctgatttcccttaattaaaacatcttttctcgtttacg

SEQ ID NO: 690 - DNA, 50 bp, Canis lupus familiaris
cgggtcaggccagcacagacggtttgtacttccttattgtacattttaag

SEQ ID NO: 691 - DNA, 50 bp, Canis lupus familiaris
ggaggacttattcggttccacgtcagaaagtgacacgtcaactttccacg

SEQ ID NO: 692 - DNA, 50 bp, Canis lupus familiaris
cgggggacttatttactggcaaatccatactcattacaagactcagccta

SEQ ID NO: 693 - DNA, 50 bp, Canis lupus familiaris
aaagcgcatatgcaagccatgaattatcaactgaaaggagtcaattaccg

SEQ ID NO: 694 - DNA, 50 bp, Canis lupus familiaris
gcaggttgaggcggcgcagcgggccctggtggaggtgctggggccttacg

SEQ ID NO: 695 - DNA, 50 bp, Canis lupus familiaris
cgggtgggctgaatgtgttgtgaaatggcgatcattgccagagattaacc

SEQ ID NO: 696 - DNA, 50 bp, Canis lupus familiaris
tcggcacctggttcaaatttaaggctcatttacacatgatgtcacacacg

SEQ ID NO: 697 - DNA, 50 bp, Canis lupus familiaris
acatggtttgcatagctggatctcagcttatctgtgcctttcggctttcg

SEQ ID NO: 698 - DNA, 50 bp, Canis lupus familiaris
cggcggaccatcagctgcctccagaaacaagtaatcaagaataggcctca

SEQ ID NO: 699 - DNA, 50 bp, Canis lupus familiaris
cgtgcatttttattcagagataattatgtgttgatcagagaagtcagcgg

SEQ ID NO: 700 - DNA, 50 bp, Canis lupus familiaris
gtagagcaccatgaagaggatggtgcagccctccttcttggtgccctgcg

SEQ ID NO: 701 - DNA, 50 bp, Canis lupus familiaris
gagaagccgatgtgtgagaagaccaccatcaacaatgagtacaactaccg

SEQ ID NO: 702 - DNA, 50 bp, Canis lupus familiaris
cgaggttagagaggtgagcaaaggaaataattaactcatttgcagccttt

SEQ ID NO: 703 - DNA, 50 bp, Canis lupus familiaris
ttctaaataggcttaagggctccatttacatgaaaagacagacagctccg

SEQ ID NO: 704 - DNA, 50 bp, Canis lupus familiaris
cttttgaagaaacctttgcaaccttcacaactgacagccccatagtgacg

SEQ ID NO: 705 - DNA, 50 bp, Canis lupus familiaris
ctgaggatgattattaattaatcaaaaacactgacttttaacttcccacg

SEQ ID NO: 706 - DNA, 50 bp, Canis lupus familiaris
aataaagtcattccacaagtgactaaatctcttaattcacaaggtacacg

SEQ ID NO: 707 - DNA, 50 bp, Canis lupus familiaris
tcagcagctcggctgaagtgggccctttgggcttgtgcacggcgaacacg

SEQ ID NO: 708 - DNA, 50 bp, Canis lupus familiaris
ggcttattaactcaatgtgaagccagattaaaatctttaattataaatcg

SEQ ID NO: 709 - DNA, 50 bp, Canis lupus familiaris
tgcctaacatgattctttcagtcatttattatgcagctgctacaacgtcg

SEQ ID NO: 710 - DNA, 50 bp, Canis lupus familiaris
cgagtcggtggtttgtcataacagtcatcagtaactgtcgctttctgccg

SEQ ID NO: 711 - DNA, 50 bp, Canis lupus familiaris
tagatcatagacacacggttcttgatatacacatgataggggtcactacg

SEQ ID NO: 712 - DNA, 50 bp, Canis lupus familiaris
cgggctctaatgcacactgttttacacgttaacggttttgaagttccagg

SEQ ID NO: 713 - DNA, 50 bp, Canis lupus familiaris
cgtgccagcttagtgtcagagtgcctgttcgccagacggccactcaggcc

SEQ ID NO: 714 - DNA, 50 bp, Canis lupus familiaris
aaatgaatttgacagcaaacatcataacagttagcagtaatgtgtgttcg

SEQ ID NO: 715 - DNA, 50 bp, Canis lupus familiaris
tcgtctgtatttatttagtgctctgggggagtttttctctttacgcagcg

SEQ ID NO: 716 - DNA, 50 bp, Canis lupus familiaris
tgtcctcagtctttttctgttagttcattactacacaattaccattcacg

SEQ ID NO: 717 - DNA, 50 bp, Canis lupus familiaris
tttagctcaatagtcaccagagtccaaccagacgtgtatgtcgcgcaacg

SEQ ID NO: 718 - DNA, 50 bp, Canis lupus familiaris
cgctcacgctgtgtgagctcaaatcctagcattaatgtactgctgggttc

SEQ ID NO: 719 - DNA, 50 bp, Canis lupus familiaris
cggcctggatggcccggaggtagctgtggctccgcatgcggaaacagccg

SEQ ID NO: 720 - DNA, 50 bp, Canis lupus familiaris
cgtgccctccagtggcttttctgattcgctttctgacctaaacacacatt

SEQ ID NO: 721 - DNA, 50 bp, Canis lupus familiaris
tgaataaggccctgattgcaagatcctgtttggaaaattatagtgcggcg

SEQ ID NO: 722 - DNA, 50 bp, Canis lupus familiaris
cgaggctgctatactgacttccatgtggactttggtggtacctctgtttg

SEQ ID NO: 723 - DNA, 50 bp, Canis lupus familiaris
cgccacaagcgacacaaatgaacacgccttctcagccccgccaggtgagg

SEQ ID NO: 724 - DNA, 50 bp, Canis lupus familiaris
cgacgaagggttttgttacagcatgtgcatgaaggctatgaaaaagatct

SEQ ID NO: 725 - DNA, 50 bp, Canis lupus familiaris
caaactgacagagggaacggatgctctttagtagcacatgcccaggatcg

SEQ ID NO: 726 - DNA, 50 bp, Canis lupus familiaris
cggccggctcagcgagactgaactaaaagtctcacacttcattgaacacc

SEQ ID NO: 727 - DNA, 50 bp, Canis lupus familiaris
cgaagcgctttgttcagtgcagcgttgcagaggggttttcccaggctccg

SEQ ID NO: 728 - DNA, 50 bp, Canis lupus familiaris
cgacagtgagaaggaagaaggtgaaaagtctcccagctgaattcttggct

SEQ ID NO: 729 - DNA, 50 bp, Canis lupus familiaris
cgcctaaggcaataggactgtacaatctgttatgtacgaggctgtggctt

SEQ ID NO: 730 - DNA, 50 bp, Canis lupus familiaris
tttttttcatgcttaagtccaatgtgccattttcatccacttctatttcg

SEQ ID NO: 731 - DNA, 50 bp, Canis lupus familiaris
cgcggtggtgctaagttgagtcatcagttccctttacgccctaataattg

SEQ ID NO: 732 - DNA, 50 bp, Canis lupus familiaris
cgggcagctgctgatgaactggcgggtgtagcactggccccagcccttca

SEQ ID NO: 733 - DNA, 50 bp, Canis lupus familiaris
cgatgccgagttccaagcaccattgttaatacagaccagaagaggaattg

SEQ ID NO: 734 - DNA, 50 bp, Canis lupus familiaris
atttcaaatggaaaattaatgctgaaaaatagccctgagctctcttgtcg

SEQ ID NO: 735 - DNA, 50 bp, Canis lupus familiaris
cgagctaagctccattcaaggccaggaaagaaaatgagcacaaataaata

SEQ ID NO: 736 - DNA, 50 bp, Canis lupus familiaris
cgcagtacatgctgtggttctccagctcgtggtctgtgcaggtggagacc

SEQ ID NO: 737 - DNA, 50 bp, Canis lupus familiaris
catctcttttatcctcgcttatgaataaggtaagagccatccatcacacg

SEQ ID NO: 738 - DNA, 50 bp, Canis lupus familiaris
aatttattttattgcttttatacttggccatttcctgtagcacattatcg

SEQ ID NO: 739 - DNA, 50 bp, Canis lupus familiaris
cgctgggctctgccaagcgttgcctctgataatgagtgggatttggttaa

SEQ ID NO: 740 - DNA, 50 bp, Canis lupus familiaris
tgcatggggacaatgatgcttgatgtgacaattaggcttctaaacacacg

SEQ ID NO: 741 - DNA, 50 bp, Canis lupus familiaris
gagttacaagctttcttccactgccatctggcaggtttactgatggatcg

SEQ ID NO: 742 - DNA, 50 bp, Canis lupus familiaris
cggctcatttacggactatttaggtcgtgcagtgagccagatgagaacag

SEQ ID NO: 743 - DNA, 50 bp, Canis lupus familiaris
cggatgggaggcactggggtcctctagctcgtaagtcctcatgagacatc

SEQ ID NO: 744 - DNA, 50 bp, Canis lupus familiaris
aagcgtctggatgccgcacatttacatctaacaagagaccccagaaaacg

SEQ ID NO: 745 - DNA, 50 bp, Canis lupus familiaris
cgagctggagaatcccacacagctgtgttgtggaaatgttctcaatttcc

SEQ ID NO: 746 - DNA, 50 bp, Canis lupus familiaris
cgacagaagcgtcacgttggaagcttttgagtgattatttaattaaccat

SEQ ID NO: 747 - DNA, 50 bp, Canis lupus familiaris
gtgtgttttggtgttgtttgtgtgtgcaatctcgtgccgcttcctgaacg

SEQ ID NO: 748 - DNA, 50 bp, Canis lupus familiaris
gggctgtgggggtcggtcaccagcccctcgtgagagctctctggtgtgcg

SEQ ID NO: 749 - DNA, 50 bp, Canis lupus familiaris
cggggcatgtgtttactgttatgcagatgaatgcaatatgggaagacatt

SEQ ID NO: 750 - DNA, 50 bp, Canis lupus familiaris
cgttgccatggaaacttcctgtgctgataacaaggataatgagggaggtg

SEQ ID NO: 751 - DNA, 50 bp, Canis lupus familiaris
cgctggccatttgttggcaagttcatatttcacactgcagggaattgaaa

SEQ ID NO: 752 - DNA, 50 bp, Canis lupus familiaris
agaaaccttggaacttacccatcaagtctccgctcataacgtccttctcg

SEQ ID NO: 753 - DNA, 50 bp, Canis lupus familiaris
cgggccagtagtctgcaaaactcatggtaattgtttgggtctgataaact

SEQ ID NO: 754 - DNA, 50 bp, Canis lupus familiaris
ggccatcctgggctccatggtgaacgccttcatggtgggctgcatgttcg

SEQ ID NO: 755 - DNA, 50 bp, Canis lupus familiaris
cattagggacaagctcattaaaaccagcccttgggcaaaagcagtttgcg

SEQ ID NO: 756 - DNA, 50 bp, Canis lupus familiaris
cgcacttctcaaagaccagagctaacagaggaaacaacgggtgcctaacg

SEQ ID NO: 757 - DNA, 50 bp, Canis lupus familiaris
cgagttatggatttatggtcccggtcaagctcagcccatccccaggcagg

SEQ ID NO: 758 - DNA, 50 bp, Canis lupus familiaris
tcacactctgatgacctcttctcctcattaaaacgttcccaaagacagcg

SEQ ID NO: 759 - DNA, 50 bp, Canis lupus familiaris
cggaagagtaatttgaatgaaattacacttgacagcctgtctccaagcaa

SEQ ID NO: 760 - DNA, 50 bp, Canis lupus familiaris
cggcaggaggtggggatgaattaaaaaccataaaattgatgctatcactc

SEQ ID NO: 761 - DNA, 50 bp, Canis lupus familiaris
aaatgcacacacaaagcggagcccgggtgagaggtgccttgtcagaggcg

SEQ ID NO: 762 - DNA, 50 bp, Canis lupus familiaris
cgcaagcagcataaaatagtgtttaaacaaatattgtattggcatgctca

SEQ ID NO: 763 - DNA, 50 bp, Canis lupus familiaris
ttctctttcacagtaggcagcagagcatatggttttctcttaatggaacg

SEQ ID NO: 764 - DNA, 50 bp, Canis lupus familiaris
ggtcctgcatgtgggtacgtaccagcattgtcctcagcttcacaaagtcg

SEQ ID NO: 765 - DNA, 50 bp, Canis lupus familiaris
cgagagttctgagcaaggagatttaacctttcagcaaggggatgtgattt

SEQ ID NO: 766 - DNA, 50 bp, Canis lupus familiaris
gatgcagtaattattttcgtatttacgccattaacgattgtaatttaacg

SEQ ID NO: 767 - DNA, 50 bp, Canis lupus familiaris
cttcagtgttgccctggaaactgtccaccttgtgatcaaaactgtggacg

SEQ ID NO: 768 - DNA, 50 bp, Canis lupus familiaris
cggtggtcgtgaataaaagagaaacattcatttatggtaattggtttcag

SEQ ID NO: 769 - DNA, 50 bp, Canis lupus familiaris
ctgatcataaaataactcaatggaaatgtgtaactgcctcaggcagctcg

SEQ ID NO: 770 - DNA, 50 bp, Canis lupus familiaris
gtcacctctcatcaccataatatttacatcaaatgcaaaaggcctcctcg

SEQ ID NO: 771 - DNA, 50 bp, Canis lupus familiaris
cgtgaatcattccatcacaatgtccttattgatttccacaggaagaggat

SEQ ID NO: 772 - DNA, 50 bp, Canis lupus familiaris
tgatttgtcaggtctgaagctttgacgtgcccaaggggcagaccccagcg

SEQ ID NO: 773 - DNA, 50 bp, Canis lupus familiaris
tgagggatatttacaaagcttggatcccgtggtccaacactgacgaatcg

SEQ ID NO: 774 - DNA, 50 bp, Canis lupus familiaris
cgtggtccacccagggatgtaaaactgtgcttaccgatgcatcccatacg

SEQ ID NO: 775 - DNA, 50 bp, Canis lupus familiaris
tactgcaatccttcccaccttgttttcagtatttcttaatcattaagtcg

SEQ ID NO: 776 - DNA, 50 bp, Canis lupus familiaris
cgactaaataaaagaataatgtttactcagaactgatgtacttgtttaaa

SEQ ID NO: 777 - DNA, 50 bp, Canis lupus familiaris
gctggttgttgaagaccttgaggctgcagccgctggggatcttgcagacg

SEQ ID NO: 778 - DNA, 50 bp, Canis lupus familiaris
cgcctgaaattcaaattagagttttgctgaagctgctaaaactcatcaaa

SEQ ID NO: 779 - DNA, 50 bp, Canis lupus familiaris
ctaattattgtgttgttttcagagcaaatatgtcatatccatggcgaccg

SEQ ID NO: 780 - DNA, 50 bp, Canis lupus familiaris
aagccttctgatgccatcggttcaatcacagtttttacaatatcatcacg

SEQ ID NO: 781 - DNA, 50 bp, Canis lupus familiaris
cgcagacagtttagttatgcaaatctgattgatcgagagcatattgcagg

SEQ ID NO: 782 - DNA, 50 bp, Canis lupus familiaris
tgccgctgtattaatacacatcaggggccagctcctagcactaaatcacg

SEQ ID NO: 783 - DNA, 50 bp, Canis lupus familiaris
agacaaaaagattttgtctcactaaacctgtttattgaccaaaactgtcg

SEQ ID NO: 784 - DNA, 50 bp, Canis lupus familiaris
cgttggcaagagcgtcatcagagtcagctgggagtgacaggcatgttcta

SEQ ID NO: 785 - DNA, 50 bp, Canis lupus familiaris
cgctctgttaaagtttgaattaatttttcccatgggtttgttcacattct

SEQ ID NO: 786 - DNA, 50 bp, Canis lupus familiaris
ggccggtggggcagtccttgaggaagcccttgtaccactcctgcagctcg

SEQ ID NO: 787 - DNA, 50 bp, Canis lupus familiaris
cgactgggtgcaatgataaattatgaattttctaatttgctgcataatga

SEQ ID NO: 788 - DNA, 50 bp, Canis lupus familiaris
gttctgaagaaaactggtaagctgatctcttcatgtaataacttctcccg

SEQ ID NO: 789 - DNA, 50 bp, Canis lupus familiaris
gcagtgtgaaatatgaacttgccaacaaatggccagcgtgctgtgcctcg

SEQ ID NO: 790 - DNA, 50 bp, Canis lupus familiaris
gggggtggagagcggctccacgtcttgatgacaatatgccatacttgacg

SEQ ID NO: 791 - DNA, 50 bp, Canis lupus familiaris
attaccgtctttgttcatgttgacttccaaacacttcttcagccgacacg

SEQ ID NO: 792 - DNA, 50 bp, Canis lupus familiaris
cgtcgtcagtaaactgttggcaggatactgcaccagaggtatacttttta

SEQ ID NO: 793 - DNA, 50 bp, Canis lupus familiaris
cgcagggaaaatgagggacttttgggggcagatgtgtttccattccacta

SEQ ID NO: 794 - DNA, 50 bp, Canis lupus familiaris
gcgtcaagggggctctggagagccatttcctcaaatgccccaagccctcg

SEQ ID NO: 795 - DNA, 50 bp, Canis lupus familiaris
aagaggtgaatgcgaccggcaaagccattgctctcatgatggctggcacg

SEQ ID NO: 796 - DNA, 50 bp, Canis lupus familiaris
cgccactatgttgacaggctatttgaccctgatccccagaaagttctaca

SEQ ID NO: 797 - DNA, 50 bp, Canis lupus familiaris
cgcagattaaaataaaatagggactttgccgatggatggaagtggtaatt

SEQ ID NO: 798 - DNA, 50 bp, Canis lupus familiaris
tatggtcatgaattgtgggcagcactactgccccctcacctgatacaccg

SEQ ID NO: 799 - DNA, 50 bp, Canis lupus familiaris
cgagacatggttgtcgagagctggctcatggtcctgttaaaattgatgaa

SEQ ID NO: 800 - DNA, 50 bp, Canis lupus familiaris
agttatcaataacatttccaaggtttgttccttcatccaacaggccaacg

SEQ ID NO: 801 - DNA, 50 bp, Canis lupus familiaris
gcgaccacgacgacagattgtctatcctctggaaaagcttggcataaacg

SEQ ID NO: 802 - DNA, 50 bp, Canis lupus familiaris
tgttcaatctactgacattaatggctacctcattaatcatagcattctcg

SEQ ID NO: 803 - DNA, 50 bp, Canis lupus familiaris
cgcgaagtgtgaactctcaacagaaggaaacatgagacaactgaagtgcc

SEQ ID NO: 804 - DNA, 50 bp, Canis lupus familiaris
cgagggcaccatgtagcacagctggaccccctggggattttggatgctga

SEQ ID NO: 805 - DNA, 50 bp, Canis lupus familiaris
cgactggccgccctgagcgcaattcaattcaacagacatttactgagtgc

SEQ ID NO: 806 - DNA, 50 bp, Canis lupus familiaris
tgtttaacttgccttttttacttctacaaattatattatgaaatcagacg

SEQ ID NO: 807 - DNA, 50 bp, Canis lupus familiaris
cggcagctacctggagaatgggaaaactgatgagtacagtctgttgggga

SEQ ID NO: 808 - DNA, 50 bp, Canis lupus familiaris
cgcttttttggtgtggtctgtctggataaaagcgtggcatcaccataatc

SEQ ID NO: 809 - DNA, 50 bp, Canis lupus familiaris
cgactcctgcgagcccttgttctgtgtgataaggcaatctcctccgggat

SEQ ID NO: 810 - DNA, 50 bp, Canis lupus familiaris
cggctcctgcttctgctgctgaggttcctccgccgccatctttaaacagc

SEQ ID NO: 811 - DNA, 50 bp, Canis lupus familiaris
cgctaatatgatggatgtcagtatcaacattcagagtgatctcgacaggt

SEQ ID NO: 812 - DNA, 50 bp, Canis lupus familiaris
caacactgtggccccagcaatcgaaaagtaattccagccccatagaaacg

SEQ ID NO: 813 - DNA, 50 bp, Canis lupus familiaris
cgaggtcaccaagttgtggttaccaaggcaacgtcacatctaagaatatg

SEQ ID NO: 814 - DNA, 50 bp, Canis lupus familiaris
ggcctaatcagttaatactgataaactgccagcaataactgccaattgcg

SEQ ID NO: 815 - DNA, 50 bp, Canis lupus familiaris
cgctctctgaaagggctccgataatctggaaggcagagataaggaacacc

SEQ ID NO: 816 - DNA, 50 bp, Canis lupus familiaris
cgccggcctgctccagcacctccttcatggtctcgtggcccagcaggttg

SEQ ID NO: 817 - DNA, 50 bp, Canis lupus familiaris
cttctaggcagaggtggcattttgctttggctgtgacaacaggcaaaccg

SEQ ID NO: 818 - DNA, 50 bp, Canis lupus familiaris
cacccaacacttttgctttcttctccatctctgaagatctgctcaagacg

SEQ ID NO: 819 - DNA, 50 bp, Canis lupus familiaris
cggctggtgttgattcttaataagtgacttcctaaagctgaggcatgggg

SEQ ID NO: 820 - DNA, 50 bp, Canis lupus familiaris
cggtgcatgcctggcttctggcctcatacccagctctattctctgcacac

SEQ ID NO: 821 - DNA, 50 bp, Canis lupus familiaris
caggaacagatttttaattaaataaatagctgggtcggcaggcaggtgcg

SEQ ID NO: 822 - DNA, 50 bp, Canis lupus familiaris
tctgatttcacgctcacacattaacgagagctgacactggagattagacg

SEQ ID NO: 823 - DNA, 50 bp, Canis lupus familiaris
aaacagacgactccttctggagccagctggcgatgtaatgcaattagtcg

SEQ ID NO: 824 - DNA, 50 bp, Canis lupus familiaris
cgtgccactgattataaatagtccatcagctctgccatgtgtcatcagcc

SEQ ID NO: 825 - DNA, 50 bp, Canis lupus familiaris
cggggaatgcaaatatttatttttcgattgtacttttgcaggtgattgcc

SEQ ID NO: 826 - DNA, 50 bp, Canis lupus familiaris
cggccacgctttattaaattctcataaacctgtcaggggggacagggctc

SEQ ID NO: 827 - DNA, 50 bp, Canis lupus familiaris
aattactgtaaccatactgaataaaaaatactgccaagaacaaaaatacg

SEQ ID NO: 828 - DNA, 50 bp, Canis lupus familiaris
cggagccatcacatgatacaggtcccccatcatgtgatgagacaaatctg

SEQ ID NO: 829 - DNA, 50 bp, Canis lupus familiaris
cgctctgttttttgaggaacctgaatgaacctgaaagcaaagaccgagtg

SEQ ID NO: 830 - DNA, 50 bp, Canis lupus familiaris
cgcgggtggctctctgcaggtgtcaatttattccagagatgaggacacag

SEQ ID NO: 831 - DNA, 50 bp, Canis lupus familiaris
ccctgttctaacgactctccttattacctgacaatctatctgaactatcg

SEQ ID NO: 832 - DNA, 50 bp, Canis lupus familiaris
ctttaagtgatctggctgtgaactgttcaaatctctaattacattatacg

SEQ ID NO: 833 - DNA, 50 bp, Canis lupus familiaris
ctcctggcccagcttgctggctgctgggccgggaggggctgccaggctcg

SEQ ID NO: 834 - DNA, 50 bp, Canis lupus familiaris
cgggggccagggcctgacacagacttattggatttcacggtgttttgctg

SEQ ID NO: 835 - DNA, 50 bp, Canis lupus familiaris
ccgagatattacattgtttctgagtgaagctaaaatctctccctgacacg

SEQ ID NO: 836 - DNA, 50 bp, Canis lupus familiaris
cggttgacgacacatgacaaactcagctatatggaaacagaatctaggtt

SEQ ID NO: 837 - DNA, 50 bp, Canis lupus familiaris
tttcagagccaagaagatcaatgcgttcatgcatcatgaattaggctccg

SEQ ID NO: 838 - DNA, 50 bp, Canis lupus familiaris
cggacggacggacagacctccttcctaagcacaatagcaccagctccccg

SEQ ID NO: 839 - DNA, 50 bp, Canis lupus familiaris
ctgtggcatgttctgcccggtggaagggtcctcggagaacaagaccatcg

SEQ ID NO: 840 - DNA, 50 bp, Canis lupus familiaris
cgttctgttcccactaatggcttggggtagggcagccaggtcttacaagg

SEQ ID NO: 841 - DNA, 50 bp, Canis lupus familiaris
caggatttacaagcaagacaagaatttctcattaagtgcacattaacacg

SEQ ID NO: 842 - DNA, 50 bp, Canis lupus familiaris
cggggaaaccacataagccagagagacactcgcatctgaaaccaaagaaa

SEQ ID NO: 843 - DNA, 50 bp, Canis lupus familiaris
tttaaacaggtggtttccctttagtggaatcactgaactggtaaataacg

SEQ ID NO: 844 - DNA, 50 bp, Canis lupus familiaris
cgaggggtgggctggtatctcagaaagtgcctgacacactaaccaagctg

SEQ ID NO: 845 - DNA, 50 bp, Canis lupus familiaris
cgaggaaacttcatcttgaaaatgaacttagatgagatggtgccggtgga

SEQ ID NO: 846 - DNA, 50 bp, Canis lupus familiaris
ttaactgtgaaattttatttccgttaaaaagcaagcctgtaatcaaaacg

SEQ ID NO: 847 - DNA, 50 bp, Canis lupus familiaris
cggggtctctaatggatgcaaatgatcatgaaaagacagtgcaaaatatg

SEQ ID NO: 848 - DNA, 50 bp, Canis lupus familiaris
cccttgctggccagccggctgaggatgctgcgctcggacatctgaaggcg

SEQ ID NO: 849 - DNA, 50 bp, Canis lupus familiaris
cgaggtcagagagaccctcagtgttagagccgtaaatcctgacattataa

SEQ ID NO: 850 - DNA, 50 bp, Canis lupus familiaris
agagatgcatttgtgttgcctctgggtacactgaaaagccacttaaaccg

SEQ ID NO: 851 - DNA, 50 bp, Canis lupus familiaris
cgaaactggggagacttggaaaacgctgaggccaaactttcgatattgat

SEQ ID NO: 852 - DNA, 50 bp, Canis lupus familiaris
gctgtcagcctgtgatggattcctcacttacttcaatgaatgttctaacg

SEQ ID NO: 853 - DNA, 50 bp, Canis lupus familiaris
ttattggagtcccgaacaaaaggtgtggtaggaaggcgaggtcccctgcg

SEQ ID NO: 854 - DNA, 50 bp, Canis lupus familiaris
cgctggtagaaaattcattttagatttgctatttataaagtactcagtac

SEQ ID NO: 855 - DNA, 50 bp, Canis lupus familiaris
ctaggagatcagggtgacctagccttgccctgtagcttccctcttagacg

SEQ ID NO: 856 - DNA, 50 bp, Canis lupus familiaris
cggaatgaatttattactcttgcccatgtgaatccccagtcattcccagg

SEQ ID NO: 857 - DNA, 50 bp, Canis lupus familiaris
cgaggatgcaagcagatcactcgaaaagcctgcgagcacttcatctcaga

SEQ ID NO: 858 - DNA, 50 bp, Canis lupus familiaris
gagcatgggacaaatgacagcatggcctgaatgcagcccagacgtcatcg

SEQ ID NO: 859 - DNA, 50 bp, Canis lupus familiaris
tcatgatattaaagccgtgtcaattaatttctccccctgcttgataaacg

SEQ ID NO: 860 - DNA, 50 bp, Canis lupus familiaris
cgccagcctcggcgcctggactcgagccattgtcgccttctagggacccc

SEQ ID NO: 861 - DNA, 50 bp, Canis lupus familiaris
cgcgctcatcaccatggccatcctgcagagcccgcagaagaagctgaccc

SEQ ID NO: 862 - DNA, 50 bp, Canis lupus familiaris
cggttccacgtcagaaagtgacacgtcaactttccacggctttgatgagg

SEQ ID NO: 863 - DNA, 50 bp, Canis lupus familiaris
cggctggctatgacagcaggcacttaatttgcatgttcgacagacaacaa

SEQ ID NO: 864 - DNA, 50 bp, Canis lupus familiaris
cgtggtgctttgattaatgatgctggtgggactcccagaagaccaaagag

SEQ ID NO: 865 - DNA, 50 bp, Canis lupus familiaris
cgatgggggttttacctaccaaacggacgaaaaacaattgctctatgact

SEQ ID NO: 866 - DNA, 50 bp, Canis lupus familiaris
cgcctccttgtgcttggacgagaactggaaggtgcccttgtccttgtcca

SEQ ID NO: 867 - DNA, 50 bp, Canis lupus familiaris
aaattttgatggtgccctgcttctaatatacattgcagtaattagattcg

SEQ ID NO: 868 - DNA, 50 bp, Canis lupus familiaris
cggagactaaccataaatcatgtctttgaatcactgacaaagataaagga

SEQ ID NO: 869 - DNA, 50 bp, Canis lupus familiaris
cgaactgctccacagtggcagcctcctgtgtgcttcaccaggccctggta

SEQ ID NO: 870 - DNA, 50 bp, Canis lupus familiaris
atatatcacagtgtttccacatcaaaactgatggcaaagttacatgtccg

SEQ ID NO: 871 - DNA, 50 bp, Canis lupus familiaris
tctgctgggtccgaagatccctgatgccagatgcttgatctctgatggcg

SEQ ID NO: 872 - DNA, 50 bp, Canis lupus familiaris
aatgtgtttcctgttggtctagctcgaaaaactctttgcttcctcctgcg

SEQ ID NO: 873 - DNA, 50 bp, Canis lupus familiaris
tcccaggaaacgaggccgtcctcattgaggtcatgccccttccactgtcg

SEQ ID NO: 874 - DNA, 50 bp, Canis lupus familiaris
ggggaccaggcatcagattggagtcaagattccgagagtgtcatttgccg

SEQ ID NO: 875 - DNA, 50 bp, Canis lupus familiaris
cggaatgccatttaatttttccgaatgcagtccgtcattaggaatcttag

SEQ ID NO: 876 - DNA, 50 bp, Canis lupus familiaris
cggggatccaaaggaaagttggaagccatcatcacaccacccccagccaa

SEQ ID NO: 877 - DNA, 50 bp, Canis lupus familiaris
aaatatcagttcccatactaaatttttatccctggctgataaatatgacg

SEQ ID NO: 878 - DNA, 50 bp, Canis lupus familiaris
tctcagcatcacatcttctgtgctctttatttttgccggaccagtttgcg

SEQ ID NO: 879 - DNA, 50 bp, Canis lupus familiaris
cctgttacaaactggttctgtcaccacagagacttcaactgatcacctcg

SEQ ID NO: 880 - DNA, 50 bp, Canis lupus familiaris
tggccccattcccagaatttaacagtaggggccttgtgaaatgctaaacg

SEQ ID NO: 881 - DNA, 50 bp, Canis lupus familiaris
cgctggttgcactcatggctgcatgactcctcctgcatcccagcagcacc

SEQ ID NO: 882 - DNA, 50 bp, Canis lupus familiaris
ctgtcaatccaacacttttagggtaatttaacttaataatacctttgtcg

SEQ ID NO: 883 - DNA, 50 bp, Canis lupus familiaris
catcaattactcttccacacaaaacagaaaccttgtaaaatttattttcg

SEQ ID NO: 884 - DNA, 50 bp, Canis lupus familiaris
agcaatggcccttctgtggtcagaatggcacattcagcagcaactattcg

SEQ ID NO: 885 - DNA, 50 bp, Canis lupus familiaris
aaaatatcaatgatatcattctgaattttctgttcatcactatccaaacg

SEQ ID NO: 886 - DNA, 50 bp, Canis lupus familiaris
cgccctggggggtggcatatggcgccctgtcacctacccaagaaaaagaa

SEQ ID NO: 887 - DNA, 50 bp, Canis lupus familiaris
gccatgtgggaaagacattagtgccggccgccctgccagccaggaatgcg

SEQ ID NO: 888 - DNA, 50 bp, Canis lupus familiaris
aacaatacaggttcaacaggagttctcatcggtagttcatttttcaaacg

SEQ ID NO: 889 - DNA, 50 bp, Canis lupus familiaris
tcaaatgattttgcaagccgaatctggactgtggatgattatcgattacg

SEQ ID NO: 890 - DNA, 50 bp, Canis lupus familiaris
aacgggggattaacaggtatttgtctcagctaatttcactctctataccg

SEQ ID NO: 891 - DNA, 50 bp, Canis lupus familiaris
cggttcctgtcctctgtgatagtgagttttaaaagggaaatctccaaaga

SEQ ID NO: 892 - DNA, 50 bp, Canis lupus familiaris
cgggctgttgggtaggttaacacccttcaaggcctctttcatgtccaata

SEQ ID NO: 893 - DNA, 50 bp, Canis lupus familiaris
cgtcctttcgtgtgcagaaaccatcgattattatggggaaatctgtgaca

SEQ ID NO: 894 - DNA, 50 bp, Canis lupus familiaris
cgcctccttcctgtgggaaccatcccccgctggagtcatctctggtcata

SEQ ID NO: 895 - DNA, 50 bp, Canis lupus familiaris
acaggggccccgctgggtcagagtgaggagctgcagccactgagccagcg

SEQ ID NO: 896 - DNA, 50 bp, Canis lupus familiaris
aatgtgactgcatgttcgagatcactgcctcccatctgcaatttgtgacg

SEQ ID NO: 897 - DNA, 50 bp, Canis lupus familiaris
cgaaagtttggcctcagcgttttccaagtctccccagtttcgattgttct

SEQ ID NO: 898 - DNA, 50 bp, Canis lupus familiaris
tgactatttgcatcattgctacacctgtaaaatggataagcaagcatacg

SEQ ID NO: 899 - DNA, 50 bp, Canis lupus familiaris
acttatgatgacagtctatttattttgctataaaccctcagcacgtaacg

SEQ ID NO: 900 - DNA, 50 bp, Canis lupus familiaris
cgactgcatcctggctgatatttgataataattttaacagataaatgtag

SEQ ID NO: 901 - DNA, 50 bp, Canis lupus familiaris
cgtgggcacataattgatccatttggagaaaaaaaatgacagtgctctaa

SEQ ID NO: 902 - DNA, 50 bp, Canis lupus familiaris
cggctgaccaccgctgacttctgtgaatatccctttcaggctgaggaccg

SEQ ID NO: 903 - DNA, 50 bp, Canis lupus familiaris
cggcaatctggcactcatctgtgtccacacagcggtgcggatcatcctcc

SEQ ID NO: 904 - DNA, 50 bp, Canis lupus familiaris
cgctctgggagaggagaaagttggcagagagaagcctagcaaatatataa

SEQ ID NO: 905 - DNA, 50 bp, Canis lupus familiaris
cgctgcagcacagagattttctctgaagccagctgggagcaggtggataa

SEQ ID NO: 906 - DNA, 50 bp, Canis lupus familiaris
cgggaaaatgctgccgaattcatttagctgctgagtgttttgatctgggc

SEQ ID NO: 907 - DNA, 50 bp, Canis lupus familiaris
cgtggcatctcaatcagctgtgtttagatgctgctgtgacacaagattat

SEQ ID NO: 908 - DNA, 50 bp, Canis lupus familiaris
gagcctgtgggacaccagccgggccgctttatcttcttcattaaagtacg

SEQ ID NO: 909 - DNA, 50 bp, Canis lupus familiaris
gtcatggctgttagtgggtactctccataggtggtctctaggactggccg

SEQ ID NO: 910 - DNA, 50 bp, Canis lupus familiaris
caggtcagttttgttacagaggccaattagcagtgctaccttcgcctgcg

SEQ ID NO: 911 - DNA, 50 bp, Canis lupus familiaris
accaaaccatgtaaatttactttgttctcagctatgtttccaatttcacg

SEQ ID NO: 912 - DNA, 50 bp, Canis lupus familiaris
ttttatcagcagcaagcaggcctgattactgacaattacactctgatccg

SEQ ID NO: 913 - DNA, 50 bp, Canis lupus familiaris
cggaggaattaagctgtaaaaattacctgcagtaatttggaaacatttag

SEQ ID NO: 914 - DNA, 50 bp, Canis lupus familiaris
cgggggttcataattttctgaggttgttttgatagacttattgtgcggac

SEQ ID NO: 915 - DNA, 50 bp, Canis lupus familiaris
cggcaacttcctgctgtttggcgagtacacagtgcaatgcagtatgtctg

SEQ ID NO: 916 - DNA, 50 bp, Canis lupus familiaris
cgccgtattttttgtcctgcaaatgaaattcattgctgccggttagtgat

SEQ ID NO: 917 - DNA, 50 bp, Canis lupus familiaris
tctcacctctagaggtggtccctccaggtcagggttgaggcacatggacg

SEQ ID NO: 918 - DNA, 50 bp, Canis lupus familiaris
cgctggcttgtgcccaggactttaccccgcttggaaccaaaggagtgttc

SEQ ID NO: 919 - DNA, 50 bp, Canis lupus familiaris
aaacagggcctgcgcgccttaattacatctgatttttaattcagaatacg

SEQ ID NO: 920 - DNA, 50 bp, Canis lupus familiaris
gcctcttgttccccgtgtaatttgcagccaatcatcagtaggtgtccacg

SEQ ID NO: 921 - DNA, 50 bp, Canis lupus familiaris
gtactgtagtttctcatggaaacactttgtgaaaagccagtcgtatatcg

SEQ ID NO: 922 - DNA, 50 bp, Canis lupus familiaris
cgggggctggtttatcaaatgtagcaaagtgcaggttgagaaagtcagaa

SEQ ID NO: 923 - DNA, 50 bp, Canis lupus familiaris
gttgacgtgtcactttctgacgtggaaccgaataagtcctccgtggtacg

SEQ ID NO: 924 - DNA, 50 bp, Canis lupus familiaris
cggttaagcaaattatgaggaggcgggcgatgtcctcactctaataattt

SEQ ID NO: 925 - DNA, 50 bp, Canis lupus familiaris
cgcacacatacccgaccaaggcctcaactctgagcaagagctaggaagga

SEQ ID NO: 926 - DNA, 50 bp, Canis lupus familiaris
tcctctgccaaatcatccaataattaagttttatgttatttgtatgaacg

SEQ ID NO: 927 - DNA, 50 bp, Canis lupus familiaris
tggtgggtgaaaatctatcctggataactcctggaccagtaccaattccg

SEQ ID NO: 928 - DNA, 50 bp, Canis lupus familiaris
cggtcatgtgtgtattttttcatagtcccaccttggagcatttatgtaga

SEQ ID NO: 929 - DNA, 50 bp, Canis lupus familiaris
cgctgccgcatcctgactgctcctggcaacggggtcccgcagccaggcag

SEQ ID NO: 930 - DNA, 50 bp, Canis lupus familiaris
cggtcccttgtggtcagccctcatgaagacatgagaacctggctcaagta

SEQ ID NO: 931 - DNA, 50 bp, Canis lupus familiaris
cgcagcacgccagcctaagctgagagctgtaatgtcattaaattgcaaat

SEQ ID NO: 932 - DNA, 50 bp, Canis lupus familiaris
cacgtctttggcggcgctgatgccatcctctttgaggtttttctcaatcg

SEQ ID NO: 933 - DNA, 50 bp, Canis lupus familiaris
tgtgggatgttcagaaagttgccgtcccggggtccgatgctgacaaaccg

SEQ ID NO: 934 - DNA, 50 bp, Canis lupus familiaris
cgactctacctctctgaaaattggatctgcttctacagcaacatcttccg

SEQ ID NO: 935 - DNA, 50 bp, Canis lupus familiaris
catttctgttcttccttgcaagattgtgaatgcttcggccactccaatcg

SEQ ID NO: 936 - DNA, 50 bp, Canis lupus familiaris
tgattctgaatgaaaacaaattggcccgctttcttctccaaacagacgcg

SEQ ID NO: 937 - DNA, 50 bp, Canis lupus familiaris
aaattcagttttgagagtaaactctccgcattttccaccaaaacatcccg

SEQ ID NO: 938 - DNA, 50 bp, Canis lupus familiaris
cgtcttgcttgccaattgccatagaaatcttaacacaccatgaagattgt

SEQ ID NO: 939 - DNA, 50 bp, Canis lupus familiaris
acccacgtcatgaccacaggtctcaatataaaattatagagaacacagcg

SEQ ID NO: 940 - DNA, 50 bp, Canis lupus familiaris
cgatagtcttgaccgagaatgctgccttgacgttcctttggtatttttac

SEQ ID NO: 941 - DNA, 50 bp, Canis lupus familiaris
tccttgaactgcttcattcgagcctccagagggacaatggccctttctcg

SEQ ID NO: 942 - DNA, 50 bp, Canis lupus familiaris
ctgcaataggccgagccggctgcattaagcttcttgcaatcaataaagcg

SEQ ID NO: 943 - DNA, 50 bp, Canis lupus familiaris
attacaggaaattattgtcattctcctgttaaaataacacataatcatcg

SEQ ID NO: 944 - DNA, 50 bp, Canis lupus familiaris
cgggtaaaaatggggctgtcatcttgagctacaagttagaaagttattac

SEQ ID NO: 945 - DNA, 50 bp, Canis lupus familiaris
tggtaggagcgcttgcctcgtcgctacagcttttatagggctgtaaaacg

SEQ ID NO: 946 - DNA, 50 bp, Canis lupus familiaris
cgcttcgggaaaccagccaagcgcaaaatgtggaaactaaaatcctttgg

SEQ ID NO: 947 - DNA, 50 bp, Canis lupus familiaris
cgctgacacccaggaagaaaaattggaccccttgggagatggaccgattt

SEQ ID NO: 948 - DNA, 50 bp, Canis lupus familiaris
ctcctaacaatcctccaggtgtggtttcagaaccgaagagccaagttccg

SEQ ID NO: 949 - DNA, 50 bp, Canis lupus familiaris
cgtggcagggccgaggtgaagttctgactctgcatttctctaatccccag

SEQ ID NO: 950 - DNA, 50 bp, Canis lupus familiaris
cgagggatctcagccccacaatatttcactttaaagagaaatggaaacaa

SEQ ID NO: 951 - DNA, 50 bp, Canis lupus familiaris
cggcactttctgatgtaacaatcgagtgtgtgttttcccaactgcagctt

SEQ ID NO: 952 - DNA, 50 bp, Canis lupus familiaris
cgaggccataattaatttgagatttatttttattggagaactcgagtctc

SEQ ID NO: 953 - DNA, 50 bp, Canis lupus familiaris
ccttgtttcagtctttaccactggcatctccgttgaggctgcctgaaacg

SEQ ID NO: 954 - DNA, 50 bp, Canis lupus familiaris
cctggatgtggtgctgctaatgggtgctgcactgggccagatgggcatcg

SEQ ID NO: 955 - DNA, 50 bp, Canis lupus familiaris
cgactcgccaaaagttctgaaggcatcgtgttgattaatgcaatttatct

SEQ ID NO: 956 - DNA, 50 bp, Canis lupus familiaris
cgggcttatctgtaaactgactgaattcacactgggatgctaagaaaata

SEQ ID NO: 957 - DNA, 50 bp, Unknown
  Description of Unknown: Cat/Mouse/Rat/Human CpG sequence
cgcagagttcttggcgcaccaatgactcggggacaatcactacttatttc

SEQ ID NO: 958 - DNA, 50 bp, Unknown
  Description of Unknown: Cat/Mouse/Rat/Human CpG sequence
cagcattgaagagcgatttccttaatgagatggagcggttgcacgtcacg

SEQ ID NO: 959 - DNA, 50 bp, Unknown
  Description of Unknown: Cat/Mouse/Rat/Human CpG sequence
tgaagctgttgtctggaggcaatgatcccaaatctgaaggctttattccg

SEQ ID NO: 960 - DNA, 50 bp, Unknown
  Description of Unknown: Cat/Mouse/Rat/Human CpG sequence
cgccagagaaaggggcttttcttgttgctgacgacatgtgtgtgacatgt

SEQ ID NO: 961 - DNA, 50 bp, Unknown
  Description of Unknown: Cat/Mouse/Rat/Human CpG sequence
ccgccttggcagcagaaggtgacatctggtgactaatggccgcggctgcg

SEQ ID NO: 962 - DNA, 50 bp, Unknown
  Description of Unknown: Cat/Mouse/Human/Universal CpG sequence
gacccctttactccgtgacgtgcaaccgctccatctcattaaggaaatcg

SEQ ID NO: 963 - DNA, 50 bp, Unknown
  Description of Unknown: Cat/Mouse/Human/Universal CpG sequence
cgcaggttgaagttcatgagttcgcccagcctcagtgacctgggcaagag

SEQ ID NO: 964 - DNA, 50 bp, Unknown
  Description of Unknown: Cat/Mouse/Human/Universal CpG sequence
cggaattcagaatagttatcacatttaaagctgctaaaccaatggcagtg

SEQ ID NO: 965 - DNA, 50 bp, Unknown
  Description of Unknown: Cat/Mouse/Human/Universal CpG sequence
gcagcttgcaatgctcgaacagaaataaatttcacttcctcaaactctcg

SEQ ID NO: 966 - DNA, 50 bp, Unknown
  Description of Unknown: Cat/Mouse/Human/Universal CpG sequence
ggtcagggtgtaggggtaccaccaggctggggagcgctccaggtagtgcg

SEQ ID NO: 967 - DNA, 50 bp, Unknown
  Description of Unknown: Cat/Mouse/Human CpG sequence
cggcgctgatgccatcctctttgaggtttttctcaatcgccttgctccgc

SEQ ID NO: 968 - DNA, 50 bp, Unknown
  Description of Unknown: Cat/Mouse/Human CpG sequence
tggcttcctcgtgctccagcgagtggaagtgcaggtggttgggcagcgcg

SEQ ID NO: 969 - DNA, 50 bp, Unknown
  Description of Unknown: Cat/Mouse/Human CpG sequence
cgctagaagggaaacagtctctgcattcacagggctgggctgtcaagtgc

SEQ ID NO: 970 - DNA, 50 bp, Unknown
  Description of Unknown: Cat/Mouse/Human CpG sequence
agatgggccactttcttctggccacaaaggggccggaatggagcgctccg

SEQ ID NO: 971 - DNA, 50 bp, Unknown
  Description of Unknown: Cat/Mouse/Human CpG sequence
gtcctcagtgacttcatgagccccctgtttaccttacatggtcacacgcg

SEQ ID NO: 972 - DNA, 50 bp, Unknown
  Description of Unknown: Cat/Mouse/Human CpG sequence
gagttcggggctctgctgcaatgtctgcgaggctgactttgagcgcctcg

SEQ ID NO: 973 - DNA, 50 bp, Unknown
  Description of Unknown: Cat/Mouse/Human CpG sequence
atactctggcttggggactggaataaaacacacgcgctctgaggcagccg

SEQ ID NO: 974 - DNA, 50 bp, Unknown
  Description of Unknown: Cat/Mouse/Human CpG sequence
ttctgaattcaccaaagagagttttctgttatatttcagaagtacttacg

SEQ ID NO: 975 - DNA, 50 bp, Unknown
  Description of Unknown: Cat/Mouse CpG sequence
cgccaactcatcctgcatcaagtgcccattgagtagcactgtcactttaa

SEQ ID NO: 976 - DNA, 50 bp, Unknown
  Description of Unknown: Cat/Rat/Human/Universal CpG sequence
cgaagggcagttcgtaaacagcacttgttcttttaataaaagaatgtttt

SEQ ID NO: 977 - DNA, 50 bp, Unknown
  Description of Unknown: Cat/Rat/Human/Universal CpG sequence
cggccaaacagctgaagaaaatcaaagacatcgaggcgcaggccctccag

SEQ ID NO: 978 - DNA, 50 bp, Unknown
  Description of Unknown: Cat/Rat/Human/Universal CpG sequence
gagctggagcaactgagacaggaggccgagcagctccggaaccagatccg

SEQ ID NO: 979 - DNA, 50 bp, Unknown
  Description of Unknown: Cat/Rat/Human/Universal CpG sequence
cgccgggatgagccgccccctggacaccagcctgcgcctcaagaccttca

SEQ ID NO: 980 - DNA, 50 bp, Unknown
  Description of Unknown: Cat/Rat/Human/Universal CpG sequence
cgagcagtattgcttatcagaacacaccaacagtctttttgtaatattcg

SEQ ID NO: 981 - DNA, 50 bp, Unknown
  Description of Unknown: Cat/Rat/Human/Universal CpG sequence
ctaggtaagtgttggagatttaaacctaccctttgcgccatcagtctgcg

SEQ ID NO: 982 - DNA, 50 bp, Unknown
  Description of Unknown: Cat/Rat/Human CpG sequence
cggatttctatgaagaaatcgaggtgagctgcaccccggactgcgccacc

SEQ ID NO: 983 - DNA, 50 bp, Unknown
  Description of Unknown: Cat/Rat/Human CpG sequence
cgggctaaaccccggtcccgccgtacccatgaaggaccacgacgccatca

SEQ ID NO: 984 - DNA, 50 bp, Unknown
  Description of Unknown: Cat/Rat/Human CpG sequence
tgaacctggtatctggtgatcctatcttgtttcatctgttcaaatttgcg

SEQ ID NO: 985 - DNA, 50 bp, Unknown
  Description of Unknown: Cat/Rat/Human CpG sequence
gggtgtgtttcttcggtcattttcttgttcacctagacgcctgtcccgcg

SEQ ID NO: 986 - DNA, 50 bp, Unknown
  Description of Unknown: Cat/Rat/Human CpG sequence
cgcagcacgcggcacagcgcccccttgtccatggtctcgaagtccgggct

SEQ ID NO: 987 - DNA, 50 bp, Unknown
  Description of Unknown: Cat/Rat/Human CpG sequence
cgccacgtacccgcagcagaaccgctcgctgtcgtcgcagagctacagcc

SEQ ID NO: 988 - DNA, 50 bp, Unknown
  Description of Unknown: Cat/Rat/Human CpG sequence
ccaaaccggtcttgcaggtcccaggaaggtggcgtcagcatctgcagccg

SEQ ID NO: 989 - DNA, 50 bp, Unknown
  Description of Unknown: Cat/Rat/Human CpG sequence
cgtctggccgcatctcagatgtgtcacctatgccgggagggaataaggaa

SEQ ID NO: 990 - DNA, 50 bp, Unknown
  Description of Unknown: Cat/Rat/Human CpG sequence
caatgacgaggcagcggggcaggtgctgcgagaaatacttgaagagctcg

SEQ ID NO: 991 - DNA, 50 bp, Unknown
  Description of Unknown: Cat/Rat/Human CpG sequence
acattggctggaaagtggagcagctcgtcagggacaatcaatggcgatcg

SEQ ID NO: 992 - DNA, 50 bp, Unknown
  Description of Unknown: Cat/Rat/Human CpG sequence
cagacagctgtgggacggtgctcggaagcgccgtgtcaccgtaaacaccg

SEQ ID NO: 993 - DNA, 50 bp, Unknown
  Description of Unknown: Cat/Rat/Human CpG sequence
cctggcggcaatcaatttgggtgtcacatgaaataggcataattattccg

SEQ ID NO: 994 - DNA, 50 bp, Unknown
  Description of Unknown: Cat/Rat/Human CpG sequence
cgctagctagtaggagggctttatggagcagaaaaacgacaaagcgagaa

SEQ ID NO: 995 - DNA, 50 bp, Unknown
  Description of Unknown: Cat/Rat/Human CpG sequence
cgatgagcttcttggcatatttcctgacaatgttatcttctccgaagatg

SEQ ID NO: 996 - DNA, 50 bp, Unknown
  Description of Unknown: Cat/Rat/Human CpG sequence
gcacgatgatggggcaggtgatactgtaggtcatgaccaccgtgaagacg

SEQ ID NO: 997 - DNA, 50 bp, Unknown
  Description of Unknown: Cat/Rat/Human CpG sequence
cgcctatgactacgatgaacttcagagcagagtgtccaatcttgaagaaa

SEQ ID NO: 998 - DNA, 50 bp, Unknown
  Description of Unknown: Cat/Rat/Human CpG sequence
cgccattgattgtccctgacgagctgctccactttccagccaatgtcagg

SEQ ID NO: 999 - DNA, 50 bp, Unknown
  Description of Unknown: Cat/Rat/Human CpG sequence
agtggggctgggcaatgtctggaggtttccctacctggccttccagaacg

SEQ ID NO: 1000 - DNA, 50 bp, Unknown
  Description of Unknown: Cat/Rat/Human CpG sequence
gcggagcgtgttgccggcagtgctgctctggactgtactgaaggcagacg

SEQ ID NO: 1001 - DNA, 50 bp, Unknown
  Description of Unknown: Cat/Rat/Human CpG sequence
ttcatgagccccctgtttaccttacatggtcacacgcggcctaatggacg

SEQ ID NO: 1002 - DNA, 50 bp, Unknown
  Description of Unknown: Cat/Rat/Human CpG sequence
cgaactggaaagcagactccataacatgctagtcagtggagaaatcaaag

SEQ ID NO: 1003 - DNA, 50 bp, Unknown
  Description of Unknown: Cat/Rat/Human CpG sequence
tccatgatcaatcccatcatctatgccttccgcaaccaggagatccagcg

SEQ ID NO: 1004 - DNA, 50 bp, Unknown
  Description of Unknown: Cat/Rat/Human CpG sequence
cgtcctcttccgaaatgcaaaagatcagtgactttgacaggtagatgagg

SEQ ID NO: 1005 - DNA, 50 bp, Unknown
  Description of Unknown: Cat/Rat/Human CpG sequence
ctcattttagacaaactgcgagtggcattttgtttatatggttcatttcg

SEQ ID NO: 1006 - DNA, 50 bp, Unknown
  Description of Unknown: Cat/Rat/Human CpG sequence
attacgtcagtttcaagacaccaacactattaatatcaaaggagccttcg

SEQ ID NO: 1007 - DNA, 50 bp, Unknown
  Description of Unknown: Cat/Rat/Human CpG sequence
cgccggtgaatggtcagtgctggagtttgaacagggccctgaaccatctc

SEQ ID NO: 1008 - DNA, 50 bp, Unknown
  Description of Unknown: Cat/Rat/Human CpG sequence
cgtggaaagattattctgactaacgaggttctgggccactaattcattac

SEQ ID NO: 1009 - DNA, 50 bp, Unknown
  Description of Unknown: Cat/Rat/Human CpG sequence
gctctggaacagagcattgagttcattagggactctctgatttccattcg

SEQ ID NO: 1010 - DNA, 50 bp, Unknown
  Description of Unknown: Cat/Rat/Human CpG sequence
atagagctttcactgagcttgtgctatgacctaagccttcacgcagaacg

SEQ ID NO: 1011 - DNA, 50 bp, Unknown
  Description of Unknown: Cat/Rat/Human CpG sequence
ggacgagagagactgcagcaagggtttcacgtgatcgtgtgtaatgttcg

SEQ ID NO: 1012 - DNA, 50 bp, Unknown
  Description of Unknown: Cat/Rat/Human CpG sequence
cgcctgccactatacacaaacgttaaaataggaaaacggaaaacactgac

SEQ ID NO: 1013 - DNA, 50 bp, Unknown
  Description of Unknown: Cat/Rat/Human CpG sequence
cgcttaataaacataatgatgacataagatgtaattctagatgaattttc

SEQ ID NO: 1014 - DNA, 50 bp, Unknown
  Description of Unknown: Cat/Rat/Human CpG sequence
cgcgtgtctgttgtctgagcaggcagctctcagcatcacccatcctgctg

SEQ ID NO: 1015 - DNA, 50 bp, Unknown
  Description of Unknown: Cat/Rat/Human CpG sequence
ttagaacttgtagatttgagctgcctgaattggccagacagctgtaatcg

SEQ ID NO: 1016 - DNA, 50 bp, Unknown
  Description of Unknown: Cat/Human/Universal CpG sequence
aggcgggttcccggtagggtgcgcagggtgctgcggtaggtctcatgtcg

SEQ ID NO: 1017 - DNA, 50 bp, Unknown
  Description of Unknown: Cat/Human/Universal CpG sequence
cgctggcccggtgccaatcgcctttcaaagagcccctctatgattaatcg

SEQ ID NO: 1018 - DNA, 50 bp, Unknown
  Description of Unknown: Cat/Human/Universal CpG sequence
ggtggggagagcccccggcagttggagaccaaaaacaatttgcccaatcg

SEQ ID NO: 1019 - DNA, 50 bp, Unknown
  Description of Unknown: Cat/Human/Universal CpG sequence
cgggggccaagtccagggcagcccacagtcagccattcaggaaagccatc

SEQ ID NO: 1020 - DNA, 50 bp, Unknown
  Description of Unknown: Cat/Human/Universal CpG sequence
gctttcttcaagcaagtgcgtattaatttctgtcatcccaaacatcatcg

SEQ ID NO: 1021 - DNA, 50 bp, Unknown
  Description of Unknown: Cat/Human/Universal CpG sequence
gggcgcctgccaggaacactcagctcataataacctcgcggaaaacaccg

SEQ ID NO: 1022 - DNA, 50 bp, Unknown
  Description of Unknown: Cat/Human/Universal CpG sequence
cacttctgagcagggtgcagaacagtaaactataatttaaacaagaatcg

SEQ ID NO: 1023 - DNA, 50 bp, Unknown
  Description of Unknown: Cat/Human/Universal CpG sequence
ctgttactgagggcggcccgggcagtaagcagtctagagccaaggtgccg

SEQ ID NO: 1024 - DNA, 50 bp, Unknown
  Description of Unknown: Cat/Human/Universal CpG sequence
cgcgctcccatataatttatgactgcctctggtcctgatgacagattatt

SEQ ID NO: 1025 - DNA, 50 bp, Unknown
  Description of Unknown: Cat/Human/Universal CpG sequence
cggggccagcctggaagattgtcactgtaacctcttctgcctggtgagtg

SEQ ID NO: 1026 - DNA, 50 bp, Unknown
  Description of Unknown: Cat/Human/Universal CpG sequence
cgccttattgaacaattcatggtttactgaccatgttaatgatgtaatct

SEQ ID NO: 1027 - DNA, 50 bp, Unknown
  Description of Unknown: Cat/Human/Universal CpG sequence
taaataaattctgaagtaatcacgtctttgctctcctcctcacgcacacg

SEQ ID NO: 1028 - DNA, 50 bp, Unknown
  Description of Unknown: Cat/Human/Universal CpG sequence
cgccgagaagctgccggtgaccatgagcagtttgctaaaccaactgcctg

SEQ ID NO: 1029 - DNA, 50 bp, Unknown
  Description of Unknown: Cat/Human/Universal CpG sequence
cgcacagtatttgccgaatctatggaaatcttggaaatgctttgacagct

SEQ ID NO: 1030 - DNA, 50 bp, Unknown
  Description of Unknown: Cat/Human/Universal CpG sequence
cgggtctgaaagcacgtggctacgtcatggaaagccagtcttttcaatgc

SEQ ID NO: 1031 - DNA, 50 bp, Unknown
  Description of Unknown: Cat/Human/Universal CpG sequence
ctgccccaagattgatctggtccataggatgccccagatcattgcattcg

SEQ ID NO: 1032 - DNA, 50 bp, Unknown
  Description of Unknown: Cat/Human/Universal CpG sequence
tggcaggatccatgtcagtatccatttgtgcattatagtgtagtgctccg

SEQ ID NO: 1033 - DNA, 50 bp, Unknown
  Description of Unknown: Cat/Human/Universal CpG sequence
cggaggcgcaagtcctgccaggcctgccgcttcatgaaatgcctcaaagt

SEQ ID NO: 1034 - DNA, 50 bp, Unknown
  Description of Unknown: Cat/Human/Universal CpG sequence
tggccaagggcgaggcgtcggagaagatcatcatcaacgtgggcggcacg

SEQ ID NO: 1035 - DNA, 50 bp, Unknown
  Description of Unknown: Cat/Human/Universal CpG sequence
cgtcactgtgcgtgccaacattgctgccatcactgaatcagacaagttct

SEQ ID NO: 1036 - DNA, 50 bp, Unknown
  Description of Unknown: Cat/Human/Universal CpG sequence
cgagggcctgacacactaattacagtgtgagcactcaatcatcaacacct

SEQ ID NO: 1037 - DNA, 50 bp, Unknown
  Description of Unknown: Cat/Human/Universal CpG sequence
cgcgggctggttatgcatttaaatgttatttaattggattgcggaggagc

SEQ ID NO: 1038 - DNA, 50 bp, Unknown
  Description of Unknown: Cat/Human/Universal CpG sequence
cggcttcccacccacgccacccaaagaagtgtctcctgaccctagcacca

SEQ ID NO: 1039 - DNA, 50 bp, Unknown
  Description of Unknown: Cat/Human/Universal CpG sequence
cgctacacccgcctccgggactggcaccaccagcgctctgcccacgtgct

SEQ ID NO: 1040 - DNA, 50 bp, Unknown
  Description of Unknown: Cat/Human CpG sequence
accttccactttggtaagggtcaggaccggactgttgcaggcgctgagcg

SEQ ID NO: 1041 - DNA, 50 bp, Unknown
  Description of Unknown: Cat/Human CpG sequence
cgcattgagccccttagtgccttgattaacaggcagattaactcttactg

SEQ ID NO: 1042 - DNA, 50 bp, Unknown
  Description of Unknown: Cat/Human CpG sequence
gagttgcgagtgtgctgaggctgggactgtcactcattctccgatcagcg

SEQ ID NO: 1043 - DNA, 50 bp, Unknown
  Description of Unknown: Cat/Human CpG sequence
tggctacggctcctcttccgtctcctcagtgcggggaacatgtagagccg

SEQ ID NO: 1044 - DNA, 50 bp, Unknown
  Description of Unknown: Cat/Human CpG sequence
gaattctctacacaccagtaacgggatttcaattccgatggactctgccg

SEQ ID NO: 1045 - DNA, 50 bp, Unknown
  Description of Unknown: Cat/Human CpG sequence
caggtgaaaatctggttccagaatcgcaggtacaagtgcaagagacagcg

SEQ ID NO: 1046 - DNA, 50 bp, Unknown
  Description of Unknown: Cat/Human CpG sequence
cgctgcctggactcagagcacaattgcgtttcctgcgggttatttttggc

SEQ ID NO: 1047 - DNA, 50 bp, Unknown
  Description of Unknown: Cat/Human CpG sequence
cttagtagccctgtgcctgaccttcggggtggaggtgggctttaagttcg

SEQ ID NO: 1048 - DNA, 50 bp, Unknown
  Description of Unknown: Cat/Human CpG sequence
tgcagaagcagcagagcaggacgatgagaccccagatgagccagaagccg

SEQ ID NO: 1049 - DNA, 50 bp, Unknown
  Description of Unknown: Cat/Human CpG sequence
cgctccctcagctgagggctccgctccacaacaagatttactttaagaca

SEQ ID NO: 1050 - DNA, 50 bp, Unknown
  Description of Unknown: Cat/Human CpG sequence
gacattgaacccaaatttgatagactgctgtttttctggtctgaccgtcg

SEQ ID NO: 1051 - DNA, 50 bp, Unknown
  Description of Unknown: Cat/Human CpG sequence
ctacaggtaatggtcactgatgctggtgggaaaatactcctgttggagcg

SEQ ID NO: 1052 - DNA, 50 bp, Unknown
  Description of Unknown: Cat/Human CpG sequence
cggcactgccagtcaggttaatcatccctactttaattagctgttcggct

SEQ ID NO: 1053 - DNA, 50 bp, Unknown
  Description of Unknown: Cat/Human CpG sequence
ctcgttgatgggctggttgtacagccgcaggatctcctccaggctcagcg

SEQ ID NO: 1054 - DNA, 50 bp, Unknown
  Description of Unknown: Cat/Human CpG sequence
tggcttttcagtacattaaacaaagtttcataaatgtctccgctctctcg

SEQ ID NO: 1055 - DNA, 50 bp, Unknown
  Description of Unknown: Cat/Human CpG sequence
cggcagcctgcctgagatcctctagcactgaaataatatcatccagcacg

SEQ ID NO: 1056 - DNA, 50 bp, Unknown
  Description of Unknown: Cat/Human CpG sequence
tccaactgagataataaagcaaacaataacatttgatcatgatgtctacg

SEQ ID NO: 1057 - DNA, 50 bp, Unknown
  Description of Unknown: Cat/Human CpG sequence
ggtaaaacagacctgtctgagggtctaaagtgtccatctcttcaacctcg

SEQ ID NO: 1058 - DNA, 50 bp, Unknown
  Description of Unknown: Cat/Human CpG sequence
aatgttcaataatacattctccgccaggctcaattcatcagggagtttcg

SEQ ID NO: 1059 - DNA, 50 bp, Unknown
  Description of Unknown: Cat/Human CpG sequence
gctggcggcgctggagggatggtcgggggctggctggctgcaggctggcg

SEQ ID NO: 1060 - DNA, 50 bp, Unknown
  Description of Unknown: Cat/Human CpG sequence
ggtactgtcttttgtgacaaagtttcctctggtaagttacaattataacg

SEQ ID NO: 1061 - DNA, 50 bp, Unknown
  Description of Unknown: Cat/Human CpG sequence
gcaaaataatgtaaaaataatgagctcctattcccctttgatgtgcagcg

SEQ ID NO: 1062 - DNA, 50 bp, Unknown
  Description of Unknown: Cat/Human CpG sequence
cggggctattttctgagagtctcctgacaccatatctaatttccaaaatg

SEQ ID NO: 1063 - DNA, 50 bp, Unknown
  Description of Unknown: Cat/Human CpG sequence
agagctattttagaaaacccaaattgccaacagtaataatctctccgccg

SEQ ID NO: 1064 - DNA, 50 bp, Unknown
  Description of Unknown: Cat/Human CpG sequence
tcaacacggtgaagttttattgtatttccggtccccaagatttatacccg

SEQ ID NO: 1065 - DNA, 50 bp, Unknown
  Description of Unknown: Cat/Human CpG sequence
agatacaggtatcaaggccaaatgtcagttccattacacaaagccccgcg

SEQ ID NO: 1066 - DNA, 50 bp, Unknown
  Description of Unknown: Cat/Human CpG sequence
cgcctgcccgctacagctgtggaaggtcactcattggggaaatatgtttc

SEQ ID NO: 1067 - DNA, 50 bp, Unknown
  Description of Unknown: Cat/Human CpG sequence
tttgtctgcagtgaaaggcttttgttattgcttttcccctaagggtttcg

SEQ ID NO: 1068 - DNA, 50 bp, Unknown
  Description of Unknown: Cat/Human CpG sequence
cgggagctcgtccatggtgatgccctgagatttgaggtgcttcttgatgc

SEQ ID NO: 1069 - DNA, 50 bp, Unknown
  Description of Unknown: Cat/Human CpG sequence
cggcagagcccttctggacagctcccgctcacccaaacagaagacgtcgg

SEQ ID NO: 1070 - DNA, 50 bp, Unknown
  Description of Unknown: Cat/Human CpG sequence
cgctaggaggcagaacaagatcaagaaagctcagcgaacttgaacctgta

SEQ ID NO: 1071 - DNA, 50 bp, Unknown
  Description of Unknown: Cat/Human CpG sequence
ggtacaagtagccctgcggataggacatggccacacacgggcatggggcg

SEQ ID NO: 1072 - DNA, 50 bp, Unknown
  Description of Unknown: Cat/Human CpG sequence
cgcttgacatcaaagtcgaggacacgaatgtagtctaccaggacagcaaa

SEQ ID NO: 1073 - DNA, 50 bp, Unknown
  Description of Unknown: Cat/Human CpG sequence
cggagcttttaagggtttctaatcctggaaggctgtctgacatcaccccg

SEQ ID NO: 1074 - DNA, 50 bp, Unknown
  Description of Unknown: Cat/Human CpG sequence
cgtaaccatgtaggccctgcaaaggctaccagtccatctctccgtcttcg

SEQ ID NO: 1075 - DNA, 50 bp, Unknown
  Description of Unknown: Cat/Human CpG sequence
gttgacaagttttctaacagactttctgaaataatgcacatatattcacg

SEQ ID NO: 1076 - DNA, 50 bp, Unknown
  Description of Unknown: Cat/Human CpG sequence
cgccccgatattaattaacgcattaataagagggcgccattagccatgtg

SEQ ID NO: 1077 - DNA, 50 bp, Unknown
  Description of Unknown: Cat/Human CpG sequence
cgcccactgcagacagctccatcttgctcagcggcacccacagcccataa

SEQ ID NO: 1078 - DNA, 50 bp, Unknown
  Description of Unknown: Cat/Human CpG sequence
agccactgaaccacaagcagcttcgcgttaactggagtgcctgggagtcg

SEQ ID NO: 1079 - DNA, 50 bp, Unknown
  Description of Unknown: Cat/Human CpG sequence
aatgacaattagcactaatctggcactttataaattgtgatgtagcctcg

SEQ ID NO: 1080 - DNA, 50 bp, Unknown
  Description of Unknown: Cat/Human CpG sequence
aggtacctagtttctgccccaggtaggtgaggctgtgatagaccttctcg

SEQ ID NO: 1081 - DNA, 50 bp, Unknown
  Description of Unknown: Cat/Human CpG sequence
ttcggggccgtagcactgtctgagaggtttacatttctcacagtgaaccg

SEQ ID NO: 1082 - DNA, 50 bp, Unknown
  Description of Unknown: Cat/Human CpG sequence
cgccctgctgccagtcccacgtgcagacgcacctgcagcagccctccacc

SEQ ID NO: 1083 - DNA, 50 bp, Unknown
  Description of Unknown: Cat/Human CpG sequence
cgctctcgcagatctacgactggatggtccgttacgtgccctacttcaag

SEQ ID NO: 1084 - DNA, 50 bp, Unknown
  Description of Unknown: Cat/Human CpG sequence
cgcagctgatgctgttgacggttctctgacccagcagttggaggccctgg

SEQ ID NO: 1085 - DNA, 50 bp, Unknown
  Description of Unknown: Cat/Human CpG sequence
cggttaacagtttgaggtccagggtgcagctttggatcagttcatctaat

SEQ ID NO: 1086 - DNA, 50 bp, Unknown
  Description of Unknown: Cat/Human CpG sequence
ccaagcagtttgcggtgtggcaggcggccagaaaagcgtttctttaaacg

SEQ ID NO: 1087 - DNA, 50 bp, Unknown
  Description of Unknown: Cat/Human CpG sequence
cgcttctttgctaagctgttattttaaccataaaaggtaaacagaaggcg

SEQ ID NO: 1088 - DNA, 50 bp, Unknown
  Description of Unknown: Cat/Human CpG sequence
cggacacagacttccagtcttgcgaggacagcctcatagagaatgagatt

SEQ ID NO: 1089 - DNA, 50 bp, Unknown
  Description of Unknown: Cat/Human CpG sequence
cggtctctgctcatagctgagaagcccgaaggcggccatgatctctcatg

SEQ ID NO: 1090 - DNA, 50 bp, Unknown
  Description of Unknown: Cat/Human CpG sequence
actgacaaaaaatttaaaaaccaatgtccggtttcaaccagtcaaaaccg

SEQ ID NO: 1091 - DNA, 50 bp, Unknown
  Description of Unknown: Cat/Human CpG sequence
cggcccgtcagcagcccacatgtaaccgaactgtcgtgtttcatggcttt

SEQ ID NO: 1092 - DNA, 50 bp, Unknown
  Description of Unknown: Cat/Human CpG sequence
tccaaggcaaacatgccaactcggaaggccaggttgtggtgctctggacg

SEQ ID NO: 1093 - DNA, 50 bp, Unknown
  Description of Unknown: Cat/Human CpG sequence
cgctatgcaaatgacaggacaaatcatgtgaaaaagtcaggataaactgc

SEQ ID NO: 1094 - DNA, 50 bp, Unknown
  Description of Unknown: Cat/Human CpG sequence
gcttttgctattcataaattttagggccttagatattagatacacttacg

SEQ ID NO: 1095 - DNA, 50 bp, Unknown
  Description of Unknown: Cat/Human CpG sequence
ttcttttggtgttcagagtcaatataattttctagcaccatctgaaatcg

SEQ ID NO: 1096 - DNA, 50 bp, Unknown
  Description of Unknown: Cat/Human CpG sequence
ctctgctctgtctcccccttttgtaggtgactttttcacagactgctacg

SEQ ID NO: 1097 - DNA, 50 bp, Unknown
  Description of Unknown: Cat/Human CpG sequence
ccttcttgtttgcatcacctccaaggaattcataatatcaaagcttaacg

SEQ ID NO: 1098 - DNA, 50 bp, Unknown
  Description of Unknown: Cat/Human CpG sequence
cggctctccaggggaaaagctgcagttctgctcttgcaacacaaggagca

SEQ ID NO: 1099 - DNA, 50 bp, Unknown
  Description of Unknown: Cat/Human CpG sequence
acttggatgacattttgatttcatcattagcatccggcgccggattgacg

SEQ ID NO: 1100 - DNA, 50 bp, Unknown
  Description of Unknown: Cat/Human CpG sequence
taacacattttctgtgctaaaaattagattctgatatataattatcaacg

SEQ ID NO: 1101 - DNA, 50 bp, Unknown
  Description of Unknown: Cat/Human CpG sequence
cgggggtgacaagccttccagccgcttccatgattttgttgacctttgct

SEQ ID NO: 1102 - DNA, 50 bp, Unknown
  Description of Unknown: Cat/Human CpG sequence
gccactgtaggggcacttgtgcctcttttcggaggcgtgtttccccttcg

SEQ ID NO: 1103 - DNA, 50 bp, Unknown
  Description of Unknown: Cat/Human CpG sequence
cggctgacttgacaatgggcccgggaaatcccaagttagtacttagttta

SEQ ID NO: 1104 - DNA, 50 bp, Unknown
  Description of Unknown: Cat/Human CpG sequence
acaacaacaaaagcgggtttaaatcactgtcaaaatcactgtcagctccg

SEQ ID NO: 1105 - DNA, 50 bp, Unknown
  Description of Unknown: Cat/Human CpG sequence
cgcccggaccaccccccacggggtgctctcactgcgcagcgagtccctcc

SEQ ID NO: 1106 - DNA, 50 bp, Unknown
  Description of Unknown: Cat/Human CpG sequence
ctgattattttatttgcagccataattatatttctttcggctaaatcacg

SEQ ID NO: 1107 - DNA, 50 bp, Unknown
  Description of Unknown: Cat/Human CpG sequence
tcttcttgtcttacgctgcttgctcttctctccttctaaagatggttacg

SEQ ID NO: 1108 - DNA, 50 bp, Unknown
  Description of Unknown: Cat/Human CpG sequence
cgtaaaagacacataatttcaagcatttaataaggtagatttattctggg

SEQ ID NO: 1109 - DNA, 50 bp, Unknown
  Description of Unknown: Cat/Human CpG sequence
cggccgtggaactagagtggatcccagagactctctataacaccgccatc

SEQ ID NO: 1110 - DNA, 50 bp, Unknown
  Description of Unknown: Cat/Human CpG sequence
agcagaaatccgcactcagggtgttgagatacaaggcgagccccagagcg

SEQ ID NO: 1111 - DNA, 50 bp, Unknown
  Description of Unknown: Cat/Human CpG sequence
cggaataaattcggcgggacttttaacaaacatggaggcagaaagtaagt

SEQ ID NO: 1112 - DNA, 50 bp, Unknown
  Description of Unknown: Cat/Human CpG sequence
cggctaattctgtaggaaaagcactaattagaaaagcaataataatcggt

SEQ ID NO: 1113 - DNA, 50 bp, Unknown
  Description of Unknown: Cat/Human CpG sequence
ttctgctaactttcagacttcattgctgacaacaggcctcttggctttcg

SEQ ID NO: 1114 - DNA, 50 bp, Unknown
  Description of Unknown: Cat/Human CpG sequence
cgaccgcggcaggactcgaacctgcaatcttctgatccgaagtcagacgc

SEQ ID NO: 1115 - DNA, 50 bp, Unknown
  Description of Unknown: Cat/Human CpG sequence
cgcgccgccgcccatgtcattccacttcaagtgacttcatgtgatgtcag

SEQ ID NO: 1116 - DNA, 50 bp, Unknown
  Description of Unknown: Cat/Human CpG sequence
cgccggtgctagctgacccacaggaaacgagcgctgctgacctagtttgg

SEQ ID NO: 1117 - DNA, 50 bp, Unknown
  Description of Unknown: Cat/Human CpG sequence
gaagtcgttgtagaagggcttgtccagcaggtgcttctcgctgcagcccg

SEQ ID NO: 1118 - DNA, 50 bp, Unknown
  Description of Unknown: Cat/Human CpG sequence
cgcggggagcatgcatcaagggtccgtggcagtgagaagtccccacacac

SEQ ID NO: 1119 - DNA, 50 bp, Unknown
  Description of Unknown: Cat/Human CpG sequence
cgcggcacagcgcccccttgtccatggtctcgaagtccgggctctgcgcc

SEQ ID NO: 1120 - DNA, 50 bp, Unknown
  Description of Unknown: Cat/Human CpG sequence
cggacgaaggaattgttggaaaattttctcggaggttcgtatataaatgt

SEQ ID NO: 1121 - DNA, 50 bp, Unknown
  Description of Unknown: Cat/Human CpG sequence
cccgcttcctgctttctaatgttccattgtgaggagcttccattgtgacg

SEQ ID NO: 1122 - DNA, 50 bp, Unknown
  Description of Unknown: Cat/Human CpG sequence
ctatgtgacttcaaccccaagagcagcaagcagtgcaaagatgtgtcccg

SEQ ID NO: 1123 - DNA, 50 bp, Unknown
  Description of Unknown: Cat/Human CpG sequence
caactctcattcatttcgccggttaacatgagagatcatggccgccttcg

SEQ ID NO: 1124 - DNA, 50 bp, Unknown
  Description of Unknown: Cat/Human CpG sequence
gaacaggagcaagatgattctactgtagcctgccgtttctttcacttccg

SEQ ID NO: 1125 - DNA, 50 bp, Unknown
  Description of Unknown: Cat/Human CpG sequence
gacagggtcacccttcacgcagtcttccttcttaccatctttatggttcg

SEQ ID NO: 1126 - DNA, 50 bp, Unknown
  Description of Unknown: Cat/Human CpG sequence
gcttgaagtatggcatgttgcaaagatggtttctgccaagaaggtacccg

SEQ ID NO: 1127 - DNA, 50 bp, Unknown
  Description of Unknown: Cat/Human CpG sequence
gtgcaaacaggcttgcagaacgctggctgtgcagcacgcctcatacatcg

SEQ ID NO: 1128 - DNA, 50 bp, Unknown
  Description of Unknown: Cat/Human CpG sequence
aagcagactcctggctgtgacgcacttctggctgtcagccaggaagatcg

SEQ ID NO: 1129 - DNA, 50 bp, Unknown
  Description of Unknown: Cat/Human CpG sequence
cggcgagagcagaaaccacctaagaagcccaaatctcccaaagctccagg

SEQ ID NO: 1130 - DNA, 50 bp, Unknown
  Description of Unknown: Cat/Human CpG sequence
cgcccgaaggcctcgatgataacagcattgattccaatgtacatctaatt

SEQ ID NO: 1131 - DNA, 50 bp, Unknown
  Description of Unknown: Cat/Human CpG sequence
cgcccgaggagctaaccatttatgtcacactgtgacaattattctgcata

SEQ ID NO: 1132 - DNA, 50 bp, Unknown
  Description of Unknown: Cat/Human CpG sequence
cggctgatgtatggcatgtggggctggaaagctgccatcatagcccagta

SEQ ID NO: 1133 - DNA, 50 bp, Unknown
  Description of Unknown: Cat/Human CpG sequence
agccacacctcagtgttgcggcaaaataattcttggctcccctggaaacg

SEQ ID NO: 1134 - DNA, 50 bp, Unknown
  Description of Unknown: Cat/Human CpG sequence
cggccagaggtggtggagtgcaaaaagcttcctacttgcgaccgaaaaaa

SEQ ID NO: 1135 - DNA, 50 bp, Unknown
  Description of Unknown: Cat/Human CpG sequence
tgctggcgggctggtttaagggctggaacgagtgcgagcagactgttgcg

SEQ ID NO: 1136 - DNA, 50 bp, Unknown
  Description of Unknown: Cat/Human CpG sequence
gaatgaaggctaattacctcaagatcagaacaaaataactcctcatttcg

SEQ ID NO: 1137 - DNA, 50 bp, Unknown
  Description of Unknown: Cat/Human CpG sequence
ctatcgcacactggagccagtgcgtcctccagtggtaccaaatgattacg

SEQ ID NO: 1138 - DNA, 50 bp, Unknown
  Description of Unknown: Cat/Human CpG sequence
cgaggttttttgtgacctgtccctgcccatccccaaggtgggattccaga

SEQ ID NO: 1139 - DNA, 50 bp, Unknown
  Description of Unknown: Cat/Human CpG sequence
tatgacattcctaaaatatctttatttaataatgaaaacttcattatccg

SEQ ID NO: 1140 - DNA, 50 bp, Unknown
  Description of Unknown: Cat/Human CpG sequence
cgtgccaacagtcggcaaattcactgacagttcaaatgcgacatttttag

SEQ ID NO: 1141 - DNA, 50 bp, Unknown
  Description of Unknown: Cat/Human CpG sequence
tcctgggatgtgacaggtattaataaccctattagctgcaatcccatccg

SEQ ID NO: 1142 - DNA, 50 bp, Unknown
  Description of Unknown: Cat/Human CpG sequence
cgcctagagacttaaagctttaatatggattaaaataagataatcaatca

SEQ ID NO: 1143 - DNA, 50 bp, Unknown
  Description of Unknown: Cat/Human CpG sequence
cggcgccggatgctaatgatgaaatcaaaatgtcatccaagttaaatgcg

SEQ ID NO: 1144 - DNA, 50 bp, Unknown
  Description of Unknown: Cat/Human CpG sequence
aatgataatacacaattttagcactgacgcttggctgatttaggtgttcg

SEQ ID NO: 1145 - DNA, 50 bp, Unknown
  Description of Unknown: Cat/Human CpG sequence
ccacacagtacagtaacttatatacttacctggaagaacccgctttgccg

SEQ ID NO: 1146 - DNA, 50 bp, Unknown
  Description of Unknown: Cat/Human CpG sequence
tgtctgaagttgagaaagccaagatccggggatcgtacctcactgtcacg

SEQ ID NO: 1147 - DNA, 50 bp, Unknown
  Description of Unknown: Cat/Human CpG sequence
gcctgcactcacacacagacagaggggcatgattaaaaggcgagagcgcg

SEQ ID NO: 1148 - DNA, 50 bp, Unknown
  Description of Unknown: Cat/Human CpG sequence
ttgaggtgcttcttgatgcaggccagccgctgcacgttggggccccagcg

SEQ ID NO: 1149 - DNA, 50 bp, Unknown
  Description of Unknown: Cat/Human CpG sequence
cggccctcgaccatcatgtccgggaggaaatccagcttgaaggcagaagt

SEQ ID NO: 1150 - DNA, 50 bp, Unknown
  Description of Unknown: Cat/Human CpG sequence
cgtggcggccgagctgtcttgtccaattcactgaagccaggcctctaatc

SEQ ID NO: 1151 - DNA, 50 bp, Unknown
  Description of Unknown: Cat/Human CpG sequence
gaggcagccatttaactattcagaggaaacagcttcctggggcacctccg

SEQ ID NO: 1152 - DNA, 50 bp, Unknown
  Description of Unknown: Cat/Human CpG sequence
gatccccactgcttaagagacgtccaaaaattcctggtggaatgtttccg

SEQ ID NO: 1153 - DNA, 50 bp, Unknown
  Description of Unknown: Cat/Human CpG sequence
cgtggaaggtgaacgtaccccacacaggagaagtttgatgttgacaaact

SEQ ID NO: 1154 - DNA, 50 bp, Unknown
  Description of Unknown: Cat/Human CpG sequence
cggcttttcaaaggctcccaaattctaaaagacaatgacccaaccccccg

SEQ ID NO: 1155 - DNA, 50 bp, Unknown
  Description of Unknown: Cat/Human CpG sequence
caattatgatttccatctaagcaacatatgctgtttgctggcctctttcg

SEQ ID NO: 1156 - DNA, 50 bp, Unknown
  Description of Unknown: Cat/Human CpG sequence
aaggaatatgcagcacatttttgccttcttctgcaccggtttcctaggcg

SEQ ID NO: 1157 - DNA, 50 bp, Unknown
  Description of Unknown: Cat/Human CpG sequence
cggccacttcggctgtgtcaatgccattgaattctccaacaatggaggcc

SEQ ID NO: 1158 - DNA, 50 bp, Unknown
  Description of Unknown: Cat/Human CpG sequence
cgccaaaaataacccgcaggaaacgcaattgtgctctgagtccaggcagc

SEQ ID NO: 1159 - DNA, 50 bp, Unknown
  Description of Unknown: Cat/Human CpG sequence
tgcatgtccaaaggccttcaattccacctgcaagtgatactgagaaaccg

SEQ ID NO: 1160 - DNA, 50 bp, Unknown
  Description of Unknown: Cat/Human CpG sequence
cggcccctcaggaggctgattaggccacaaagagcccccattatcccgag

SEQ ID NO: 1161 - DNA, 50 bp, Unknown
  Description of Unknown: Cat/Human CpG sequence
cgagcggagcaaggcgattgagaaaaacctcaaagaggatggcatcagcg

SEQ ID NO: 1162 - DNA, 50 bp, Unknown
  Description of Unknown: Cat/Human CpG sequence
cgggaagagaagatcatcgagcatttcaaacggtgagtgacacgaggccc

SEQ ID NO: 1163 - DNA, 50 bp, Unknown
  Description of Unknown: Cat/Human CpG sequence
tactggatctcctctgggcaatgaagctgcctcctttttctcctctctcg

SEQ ID NO: 1164 - DNA, 50 bp, Unknown
  Description of Unknown: Cat/Human CpG sequence
cgttaacctgattgggtagaaagcgctgtcccaacaggcgagtcttcttc

SEQ ID NO: 1165 - DNA, 50 bp, Unknown
  Description of Unknown: Cat/Human CpG sequence
cgcgggcttgccctccagccggccttatggcattaaacctgaaccgctgt

SEQ ID NO: 1166 - DNA, 50 bp, Unknown
  Description of Unknown: Cat/Human CpG sequence
cgcaggtcacttcctgtagaaatatggactaacttaaacctcgtgagtac

SEQ ID NO: 1167 - DNA, 50 bp, Unknown
  Description of Unknown: Cat/Human CpG sequence
ctgtaggtaaacacattttctccctatttaaggctgaagcactcagcacg

SEQ ID NO: 1168 - DNA, 50 bp, Unknown
  Description of Unknown: Cat/Human CpG sequence
cgggctgctgcaccgtcaggatctgagactgcttctcagggctcactcag

SEQ ID NO: 1169 - DNA, 50 bp, Unknown
  Description of Unknown: Cat/Human CpG sequence
agaggggcatgaccacttcgggcaagcctttaaatgtgagtcagctttcg

SEQ ID NO: 1170 - DNA, 50 bp, Unknown
  Description of Unknown: Cat/Human CpG sequence
ttgatggccatgtgctcctggatgttgatggtcatgcgatcgcccctgcg

SEQ ID NO: 1171 - DNA, 50 bp, Unknown
  Description of Unknown: Cat/Human CpG sequence
cctttgggttcaagctgcctctgagaagatggcaataaaactctaaatcg

SEQ ID NO: 1172 - DNA, 50 bp, Unknown
  Description of Unknown: Cat/Human CpG sequence
tttcgcccaaatcaatgtggtttctttggaacattttcagcaaaggaacg

SEQ ID NO: 1173 - DNA, 50 bp, Unknown
  Description of Unknown: Cat/Human CpG sequence
ctccaggatagccaggctttaatttgtaatcttaattttcatataaatcg

SEQ ID NO: 1174 - DNA, 50 bp, Unknown
  Description of Unknown: Cat/Human CpG sequence
cggctcagctgttccacccgcttgcgcaggcggtcattgtcactggtcag

SEQ ID NO: 1175 - DNA, 50 bp, Unknown
  Description of Unknown: Cat/Human CpG sequence
ggaaggcagcacagtcggggcccccattgcctgcaaaactggggtccacg

SEQ ID NO: 1176 - DNA, 50 bp, Unknown
  Description of Unknown: Cat/Human CpG sequence
ctaatcccaacatgcctgttgttttgacatctggaacagggtcgcaagcg

SEQ ID NO: 1177 - DNA, 50 bp, Unknown
  Description of Unknown: Cat/Human CpG sequence
aggctgcccagctgctgcaatctggcatgcatcattcctgttctgttacg

SEQ ID NO: 1178 - DNA, 50 bp, Unknown
  Description of Unknown: Cat/Human CpG sequence
attattacccctctgtcaagaattagacacaacaatcaaagtaatcaacg

SEQ ID NO: 1179 - DNA, 50 bp, Unknown
  Description of Unknown: Cat/Human CpG sequence
tttctattcaaatccaggtagcgagatatatgaatggacttttcgaatcg

SEQ ID NO: 1180 - DNA, 50 bp, Unknown
  Description of Unknown: Cat/Human CpG sequence
cggcacttccccaccgcaggctttgctgagcagttttagtatcaggagct

SEQ ID NO: 1181 - DNA, 50 bp, Unknown
  Description of Unknown: Cat/Human CpG sequence
cgcatctagtcagacgtaaataatgacagacggaaactatcatgaggtct

SEQ ID NO: 1182 - DNA, 50 bp, Unknown
  Description of Unknown: Cat/Human CpG sequence
cgcttgagtttgacatccaggcacggccgctaaattgaggctcacaaagc

SEQ ID NO: 1183 - DNA, 50 bp, Unknown
  Description of Unknown: Cat/Human CpG sequence
cgagacaaatatgagaagaagaaatacatggaccgaagtctggacatcaa

SEQ ID NO: 1184 - DNA, 50 bp, Unknown
  Description of Unknown: Cat/Human CpG sequence
ggtgggggctggggctggccagcagctcctgctcatggcccgggcccccg

SEQ ID NO: 1185 - DNA, 50 bp, Unknown
  Description of Unknown: Cat/Human CpG sequence
agcccatgatgtaatggtgtatgttaatcagtagcatgtggggagctccg

SEQ ID NO: 1186 - DNA, 50 bp, Unknown
  Description of Unknown: Cat/Human CpG sequence
gggggatttcgggggttgcccgtgacgtggctacttgcgcagcggaagcg

SEQ ID NO: 1187 - DNA, 50 bp, Unknown
  Description of Unknown: Cat/Human CpG sequence
cgctattttgctcattttagaatattgtgggtaatgctaggcctaaagaa

SEQ ID NO: 1188 - DNA, 50 bp, Unknown
  Description of Unknown: Cat/Human CpG sequence
cgtgtcctttgtgatccactgtcaactaggcaaggagatcaaacacattt

SEQ ID NO: 1189 - DNA, 50 bp, Unknown
  Description of Unknown: Cat/Human CpG sequence
ctacctccatgctagtattagggtcaagatcatcacactctgattcctcg

SEQ ID NO: 1190 - DNA, 50 bp, Unknown
  Description of Unknown: Cat/Human CpG sequence
catttctgtgtgtctgtgcctcttcagtatgcagaacgtggtgcccatcg

SEQ ID NO: 1191 - DNA, 50 bp, Unknown
  Description of Unknown: Cat/Human CpG sequence
ttagaggctttggttctgcaaacttgatgctcggcacttgaactgtcacg

SEQ ID NO: 1192 - DNA, 50 bp, Unknown
  Description of Unknown: Cat/Human CpG sequence
gcatgcctaacatgattctttcagtcatttattatgcagctgctacaacg

SEQ ID NO: 1193 - DNA, 50 bp, Unknown
  Description of Unknown: Cat/Human CpG sequence
tatttgcccttttctgaactctacaatttccctctcttgtagctggttcg

SEQ ID NO: 1194 - DNA, 50 bp, Unknown
  Description of Unknown: Cat/Human CpG sequence
tgtttgccatcaaaatgtgacagaagagacacgctgcatggctcggaacg

SEQ ID NO: 1195 - DNA, 50 bp, Unknown
  Description of Unknown: Cat/Human CpG sequence
cgatcccataaatccaagaagataaagtgcatttttattagttgtgttgg

SEQ ID NO: 1196 - DNA, 50 bp, Unknown
  Description of Unknown: Cat/Human CpG sequence
agacaggcgattccgattgacttcctaattactgctgctgggctgcctcg

SEQ ID NO: 1197 - DNA, 50 bp, Unknown
  Description of Unknown: Cat/Universal CpG sequence
cggtgctgtaacaatactcgatgatgtttgggatgacagaaattaatacg

SEQ ID NO: 1198 - DNA, 50 bp, Unknown
  Description of Unknown: Cat/Universal CpG sequence
cgggccctgcagtgttgagcctaatgaattccgctgtggctgctctgctc

SEQ ID NO: 1199 - DNA, 50 bp, Unknown
  Description of Unknown: Cat/Universal CpG sequence
cgtcttcttcaactggctgggctacgccaactcggccttcaaccccatca

SEQ ID NO: 1200 - DNA, 50 bp, Felis catus
tgctgctgtaggtgaccttgagctcgtgcaggtctttgtaatcctctacg

SEQ ID NO: 1201 - DNA, 50 bp, Felis catus
tcttttttataagcctcttcaagcccattttgcttcgaaacaggaagtcg

SEQ ID NO: 1202 - DNA, 50 bp, Felis catus
aaaactattacattaattagtcaaatcccacaaaccgttaatggtgcacg

SEQ ID NO: 1203 - DNA, 50 bp, Felis catus
ctggggtaggccgacgtggtgccgttgtaactcaaagtgctgctggcgcg

SEQ ID NO: 1204 - DNA, 50 bp, Felis catus
cgcgacatgctggctcaaacatcagctggggcagaataaaaaattactaa

SEQ ID NO: 1205 - DNA, 50 bp, Felis catus
gatggtgtccaggaaggtgttttgcggggccagcaaccccttcatgaccg

SEQ ID NO: 1206 - DNA, 50 bp, Felis catus
cgggttttggtgatgacaaatgactactattatacagacatcaagggtac

SEQ ID NO: 1207 - DNA, 50 bp, Felis catus
cgagaacagcaagcaagttcatctgcttactgtccacacgaaacagaatt

SEQ ID NO: 1208 - DNA, 50 bp, Felis catus
cggactgtaaagtcacagttgactgctttaatgtggaacagctgggaggg

SEQ ID NO: 1209 - DNA, 50 bp, Felis catus
gccttggtaaaaaacaccttcaaagtcaagccattgtctccaaaaaatcg

SEQ ID NO: 1210 - DNA, 50 bp, Felis catus
cggcaggcccgtcgcagatggctggccactaagctaatggggcagcagcc

SEQ ID NO: 1211 - DNA, 50 bp, Felis catus
ttaaagcaacctttattttatggcaaatgttgcagtaattgccttttacg

SEQ ID NO: 1212 - DNA, 50 bp, Felis catus
cgtgcagtataaaagaatgttttttcaagtcagtgaacttaagctatttt

SEQ ID NO: 1213 - DNA, 50 bp, Felis catus
cgcctgcagtgggtattaagcacttaggttggcaatgtaatgacacactg

SEQ ID NO: 1214 - DNA, 50 bp, Felis catus
ttcactctggatttttgttcttatttttaacagagccccctcgagtgacg

SEQ ID NO: 1215 - DNA, 50 bp, Felis catus
cggacacacagcaccagacggtgcaagggaagttaagaaaagacaaatta

SEQ ID NO: 1216 - DNA, 50 bp, Felis catus
aggcgcacactagggctgtaaaaaaatttttggtttaacctttcctaccg

SEQ ID NO: 1217 - DNA, 50 bp, Felis catus
cgaagcaaaatgggcttgaagaggcttataaaaaagactcaaaaggtttc

SEQ ID NO: 1218 - DNA, 50 bp, Felis catus
cgcagcgcaggaagcaaaagcagaaacagaccatgcatcagatggctgcc

SEQ ID NO: 1219 - DNA, 50 bp, Felis catus
cggcttatctccactaaaaggggaattagtagtaagaaataatttcaatc

SEQ ID NO: 1220 - DNA, 50 bp, Felis catus
cggcagtgtctggaggctgtttggagttttatgggctgtacagtacactg

SEQ ID NO: 1221 - DNA, 50 bp, Felis catus
attacagcggatcacagaaatgttccagtctgtgagtcggaatgcagccg

SEQ ID NO: 1222 - DNA, 50 bp, Unknown
  Description of Unknown: Mouse/Rat/Human/Universal CpG sequence
tgggctgtgcctggcctaaatttttccttttaccatctctgccttatccg

SEQ ID NO: 1223 - DNA, 50 bp, Unknown
  Description of Unknown: Mouse/Rat/Human/Universal CpG sequence
cggccgccttcttcgtgctgctctccatggtgctgatcctcggctgcatc

SEQ ID NO: 1224 - DNA, 50 bp, Unknown
  Description of Unknown: Mouse/Rat/Human/Universal CpG sequence
cgagatgctcacgctctcgaatgctgccgtttggtatggtctcttccaac

SEQ ID NO: 1225 - DNA, 50 bp, Unknown
  Description of Unknown: Mouse/Rat/Human/Universal CpG sequence
caaaaggatatcacagctcattttggtggaagggtttccacgtcgcttcg

SEQ ID NO: 1226 - DNA, 50 bp, Unknown
  Description of Unknown: Mouse/Rat/Human/Universal CpG sequence
ttaaggaaacagtgtgccctccatcatattctgttaccgtattttattcg

SEQ ID NO: 1227 - DNA, 50 bp, Unknown
  Description of Unknown: Mouse/Rat/Human/Universal CpG sequence
cggtggcgccagttagtctgcagcgagaaggttcacacaccccctctatt

SEQ ID NO: 1228 - DNA, 50 bp, Unknown
  Description of Unknown: Mouse/Rat/Human/Universal CpG sequence
caaactgtcaataccttgaatgctgcagaatttgaacaaatagccgtccg

SEQ ID NO: 1229 - DNA, 50 bp, Unknown
  Description of Unknown: Mouse/Rat/Human/Universal CpG sequence
gtgctggcactcatcggcctcatcttcctcatggtgctctacctaaaccg

SEQ ID NO: 1230 - DNA, 50 bp, Unknown
  Description of Unknown: Mouse/Rat/Human/Universal CpG sequence
cggcctttgttcctggaaactaggattccatggcatatggggcacagcat

SEQ ID NO: 1231 - DNA, 50 bp, Unknown
  Description of Unknown: Mouse/Rat/Human/Universal CpG sequence
cttaagttgcgtcgcgccacagctgtctgcgaacactgagctgcctggcg

SEQ ID NO: 1232 - DNA, 50 bp, Unknown
  Description of Unknown: Mouse/Rat/Human/Universal CpG sequence
cgggaaaaggagaacaatcccagcggcaaaaaggagctgtctgaagttga

SEQ ID NO: 1233 - DNA, 50 bp, Unknown
  Description of Unknown: Mouse/Rat/Human/Universal CpG sequence
cttccagccagcccccggcaacaagaccgtgacctacttgggaaagttcg

SEQ ID NO: 1234 - DNA, 50 bp, Unknown
  Description of Unknown: Mouse/Rat/Human/Universal CpG sequence
catagttggtgtggtacagcttggcagcctcctgagccgggagcatcgcg

SEQ ID NO: 1235 - DNA, 50 bp, Unknown
  Description of Unknown: Mouse/Rat/Human/Universal CpG sequence
taccttgatcctgtcataggacctcttccatccttgtcatatcccccacg

SEQ ID NO: 1236 - DNA, 50 bp, Unknown
  Description of Unknown: Mouse/Rat/Human/Universal CpG sequence
cgtcctaattatttcagtttgggatgccagagctgtttcctggatagacc

SEQ ID NO: 1237 - DNA, 50 bp, Unknown
  Description of Unknown: Mouse/Rat/Human/Universal CpG sequence
atcacaggataattgcagaacgcctgcataagtaatttcttatgaaatcg

SEQ ID NO: 1238 - DNA, 50 bp, Unknown
  Description of Unknown: Mouse/Rat/Human CpG sequence
cggcctgcagcctgtgacagaaattaaaggaaagaccagtgacctctttt

SEQ ID NO: 1239 - DNA, 50 bp, Unknown
  Description of Unknown: Mouse/Rat/Human CpG sequence
cggccatcgggggccagggacagggacatcacatccccactgtgtccagc

SEQ ID NO: 1240 - DNA, 50 bp, Unknown
  Description of Unknown: Mouse/Rat/Human CpG sequence
acttcacaaatagaggagctcctaaatgtgcccaacagcaaggaaaatcg

SEQ ID NO: 1241 - DNA, 50 bp, Unknown
  Description of Unknown: Mouse/Rat/Human CpG sequence
tgtgtcgcctgcagctgcagagcaacctcttcgccagcctggacgagacg

SEQ ID NO: 1242 - DNA, 50 bp, Unknown
  Description of Unknown: Mouse/Rat/Human CpG sequence
tgtcaatagaaattgacaaacctcatctcctaaatagtgcagctgagccg

SEQ ID NO: 1243 - DNA, 50 bp, Unknown
  Description of Unknown: Mouse/Rat/Human CpG sequence
gctgtctaatatgttgaatagtctttcatcttgtcaaacacttccatgcg

SEQ ID NO: 1244 - DNA, 50 bp, Unknown
  Description of Unknown: Mouse/Rat/Human CpG sequence
cttcagacatgtcagcctagttatttgttttacatgctgggtgagttacg

SEQ ID NO: 1245 - DNA, 50 bp, Unknown
  Description of Unknown: Mouse/Rat/Human CpG sequence
cgcaccactttctttggtccagattcctgcatggaagaaataccctgtcg

SEQ ID NO: 1246 - DNA, 50 bp, Unknown
  Description of Unknown: Mouse/Rat/Human CpG sequence
cgcgctgggcagcgttcctggagcctcctaatagcagatattcatgacta

SEQ ID NO: 1247 - DNA, 50 bp, Unknown
  Description of Unknown: Mouse/Rat/Human CpG sequence
cgccccaacctgcagctggccaatatggtccaggtgattcggcagatgca

SEQ ID NO: 1248 - DNA, 50 bp, Unknown
  Description of Unknown: Mouse/Rat/Human CpG sequence
tgggctttgaaatccgcaccatggcgggggccgggggcagtggccccacg

SEQ ID NO: 1249 - DNA, 50 bp, Unknown
  Description of Unknown: Mouse/Rat/Human CpG sequence
cgagacagaatgtgctaacatcgggataaattagtgaaagggaagaaaga

SEQ ID NO: 1250 - DNA, 50 bp, Unknown
  Description of Unknown: Mouse/Rat/Human CpG sequence
aggcagctgatggccttgagctcgaagacaggccacttgctgcccaggcg

SEQ ID NO: 1251 - DNA, 50 bp, Unknown
  Description of Unknown: Mouse/Rat/Human CpG sequence
cgcgagggcaagcccttcaaagccaaatacaaactggttaaccacatccg

SEQ ID NO: 1252 - DNA, 50 bp, Unknown
  Description of Unknown: Mouse/Rat/Human CpG sequence
catggtaccagcatttggaatgttcagtaagccgcaggcccagcccctcg

SEQ ID NO: 1253 - DNA, 50 bp, Unknown
  Description of Unknown: Mouse/Rat/Human CpG sequence
aggacttctgactgtaatcctagcacgtcactttgttgaaggcagacacg

SEQ ID NO: 1254 - DNA, 50 bp, Unknown
  Description of Unknown: Mouse/Rat/Human CpG sequence
attacgctctcagtttgctaggttgccccttaggtcctaatcatgcagcg

SEQ ID NO: 1255 - DNA, 50 bp, Unknown
  Description of Unknown: Mouse/Rat/Human CpG sequence
cgaccccggagaccccaaggcgtttactgagattaacaggctcttgcctt

SEQ ID NO: 1256 - DNA, 50 bp, Unknown
  Description of Unknown: Mouse/Rat/Human CpG sequence
tgccaaattaaaatgaatcatttggcccataatggccgaggcgcttatcg

SEQ ID NO: 1257 - DNA, 50 bp, Unknown
  Description of Unknown: Mouse/Rat/Human CpG sequence
cggtgtccaataactacattgtggggaataagcccccaaaggaatgtggg

SEQ ID NO: 1258 - DNA, 50 bp, Unknown
  Description of Unknown: Mouse/Rat/Human CpG sequence
tggtaccaccttcctttctaaaataaaatctctctggcatgaagtcaccg

SEQ ID NO: 1259 - DNA, 50 bp, Unknown
  Description of Unknown: Mouse/Rat/Human CpG sequence
gccttggcagcagaaggtgacatctggtgactaatggccgcggctgcgcg

SEQ ID NO: 1260 - DNA, 50 bp, Unknown
  Description of Unknown: Mouse/Rat/Human CpG sequence
gtaagtaaacataccaaaaccatatttgccttgttcaaggtcccaaaccg

SEQ ID NO: 1261 - DNA, 50 bp, Unknown
  Description of Unknown: Mouse/Rat/Human CpG sequence
tagctcaagactgcagtgcagatgacgacaacttccttgtgcccatagcg

SEQ ID NO: 1262 - DNA, 50 bp, Unknown
  Description of Unknown: Mouse/Rat/Human CpG sequence
cgccgttctctgttaggagggtaatttagagcaattacaccgattattat

SEQ ID NO: 1263 - DNA, 50 bp, Unknown
  Description of Unknown: Mouse/Rat/Human CpG sequence
cggaagcgttacaggaagacaggtctcaacttagggatcagatcacgtta

SEQ ID NO: 1264 - DNA, 50 bp, Unknown
  Description of Unknown: Mouse/Rat/Human CpG sequence
cgcccctctctgggctctggggtccctgtcggtgccacggacgcttaaat

SEQ ID NO: 1265 - DNA, 50 bp, Unknown
  Description of Unknown: Mouse/Rat/Human CpG sequence
cgctgcctagtggaaataatataatacgtcattaatatggcgccaaaaga

SEQ ID NO: 1266 - DNA, 50 bp, Unknown
  Description of Unknown: Mouse/Rat/Human CpG sequence
cgtggaaatgattttgtgttatcaggctcaggggatgacagcatacaaga

SEQ ID NO: 1267 - DNA, 50 bp, Unknown
  Description of Unknown: Mouse/Rat/Human CpG sequence
cgcgggggccagcgctgcggctggattcccatccagtaccccatcatttc

SEQ ID NO: 1268 - DNA, 50 bp, Unknown
  Description of Unknown: Mouse/Rat/Human CpG sequence
cggggttagcaatttcacgggttatatattttagagaacctcattaagtg

SEQ ID NO: 1269 - DNA, 50 bp, Unknown
  Description of Unknown: Mouse/Rat/Human CpG sequence
ggtacccagctagctgatgtgtccctatgccggttacctaggagacaacg

SEQ ID NO: 1270 - DNA, 50 bp, Unknown
  Description of Unknown: Mouse/Rat/Human CpG sequence
ccggtcttgactggaaaagctggtcattaattagcctccttttgccttcg

SEQ ID NO: 1271 - DNA, 50 bp, Unknown
  Description of Unknown: Mouse/Rat/Human CpG sequence
cggctcggcattttggaacagagaagcccccgccgtatatttgctaaaaa

SEQ ID NO: 1272 - DNA, 50 bp, Unknown
  Description of Unknown: Mouse/Rat/Human CpG sequence
agaacgtcgagatggagcccaactcactccaggtatttcgctctcctccg

SEQ ID NO: 1273 - DNA, 50 bp, Unknown
  Description of Unknown: Mouse/Rat/Human CpG sequence
atgtttaaaaaccttaatttgatgctatgaggcaacccaatctttcctcg

SEQ ID NO: 1274 - DNA, 50 bp, Unknown
  Description of Unknown: Mouse/Rat/Human CpG sequence
gcgctggtattggggcagcgagggggcagttctctataacgcggtctccg

SEQ ID NO: 1275 - DNA, 50 bp, Unknown
  Description of Unknown: Mouse/Rat/Human CpG sequence
cgatcaggattactatagagatcctcgagagcggactttacaacatgggc

SEQ ID NO: 1276 - DNA, 50 bp, Unknown
  Description of Unknown: Mouse/Rat/Human CpG sequence
gtgttcgtgtcctctatggcgctgtcaataaagaacggcagtttgaatcg

SEQ ID NO: 1277 - DNA, 50 bp, Unknown
  Description of Unknown: Mouse/Rat/Human CpG sequence
ctgatgcagaccctcatggaagactatgagacacacaaatctaaaaggcg

SEQ ID NO: 1278 - DNA, 50 bp, Unknown
  Description of Unknown: Mouse/Rat/Human CpG sequence
cgcatgatgcgacccagcagagacagcaaagtcattgtatcctctatcat

SEQ ID NO: 1279 - DNA, 50 bp, Unknown
  Description of Unknown: Mouse/Rat/Human CpG sequence
cgcttcagcagggagagaaaaacctgacacgccatttcaaaccgatttca

SEQ ID NO: 1280 - DNA, 50 bp, Unknown
  Description of Unknown: Mouse/Rat/Human CpG sequence
cgccttgcaactcaagcccgtgtgcgtgtccgacagcctcaagaagggca

SEQ ID NO: 1281 - DNA, 50 bp, Unknown
  Description of Unknown: Mouse/Rat/Human CpG sequence
ctcccaggctgtgaaggcctccgcttacaagttctcctagggaatggtcg

SEQ ID NO: 1282 - DNA, 50 bp, Unknown
  Description of Unknown: Mouse/Rat/Human CpG sequence
ccatgtcccattctcgaatgttattctgtgacatataaccaagtcacccg

SEQ ID NO: 1283 - DNA, 50 bp, Unknown
  Description of Unknown: Mouse/Rat/Human CpG sequence
cggggctccgatcctccgctttgcaaatgagaatgaccccaatttccgag

SEQ ID NO: 1284 - DNA, 50 bp, Unknown
  Description of Unknown: Mouse/Rat/Human CpG sequence
acatccaatttggcttggcgtaataaaatcagccggagctcccttaaacg

SEQ ID NO: 1285 - DNA, 50 bp, Unknown
  Description of Unknown: Mouse/Rat/Human CpG sequence
cggccatagccttggcttcccggcgacctcagcgtggtcacaggggcccc

SEQ ID NO: 1286 - DNA, 50 bp, Unknown
  Description of Unknown: Mouse/Rat/Human CpG sequence
cgggattgtgtaaagatgattacagccctatcattaatcagatgcctgca

SEQ ID NO: 1287 - DNA, 50 bp, Unknown
  Description of Unknown: Mouse/Rat/Human CpG sequence
cgtgatttatatttattcagaggaataacagagggtggatctgttcccgg

SEQ ID NO: 1288 - DNA, 50 bp, Unknown
  Description of Unknown: Mouse/Rat/Human CpG sequence
cgcacttaatattgattttgttagtgttcagattcaataataaggtactg

SEQ ID NO: 1289 - DNA, 50 bp, Unknown
  Description of Unknown: Mouse/Rat/Human CpG sequence
cgctttgaagtttttgtctaatggctctaaactgaaagaaaatgttttcc

SEQ ID NO: 1290 - DNA, 50 bp, Unknown
  Description of Unknown: Mouse/Rat/Human CpG sequence
taaaatccttttgattgacgttgtagcctccggtgccctgggctcaggcg

SEQ ID NO: 1291 - DNA, 50 bp, Unknown
  Description of Unknown: Mouse/Rat/Human CpG sequence
atcgtcatgctgaggatgctgccacaggcagccactgaggatgacgtacg

SEQ ID NO: 1292 - DNA, 50 bp, Unknown
  Description of Unknown: Mouse/Rat/Human CpG sequence
cgtccggtgtctgcgtgccaagctgtattaccaactgcttggtctgtgcc

SEQ ID NO: 1293 - DNA, 50 bp, Unknown
  Description of Unknown: Mouse/Rat/Human CpG sequence
cgctatctgtcatgcattttaatttcctgaaacgagagacacaagagcca

SEQ ID NO: 1294 - DNA, 50 bp, Unknown
  Description of Unknown: Mouse/Rat/Human CpG sequence
ttctgctctgtcgtctctccacagcacctttgtgaactcaggaatgtgcg

SEQ ID NO: 1295 - DNA, 50 bp, Unknown
  Description of Unknown: Mouse/Rat/Human CpG sequence
tgtctcccacatggacgatggtggagctgaagctacactgactggtgacg

SEQ ID NO: 1296 - DNA, 50 bp, Unknown
  Description of Unknown: Mouse/Rat/Human CpG sequence
cgctgctgcctgacaggactgcccaggtctcctaaaggtgaagagtttca

SEQ ID NO: 1297 - DNA, 50 bp, Unknown
  Description of Unknown: Mouse/Rat/Human CpG sequence
ccatgggcttcctgcaccagctgcagctgctgctctggaagaacgtgacg

SEQ ID NO: 1298 - DNA, 50 bp, Unknown
  Description of Unknown: Mouse/Rat/Human CpG sequence
ctcaaaattagcttaatcacagctcatttaaacttatctaaacaacagcg

SEQ ID NO: 1299 - DNA, 50 bp, Unknown
  Description of Unknown: Mouse/Rat/Human CpG sequence
cgacgtgggccttttgatcagaaaagaaattagctctaaaaaacagacaa

SEQ ID NO: 1300 - DNA, 50 bp, Unknown
  Description of Unknown: Mouse/Rat/Human CpG sequence
cgacactaaaagtgtgtttatctctgtaggaagtaaacggttagtcaatc

SEQ ID NO: 1301 - DNA, 50 bp, Unknown
  Description of Unknown: Mouse/Rat/Human CpG sequence
cgcctagcattggaaatgaaagtgacatttacgccacaacccacgtgtgc

SEQ ID NO: 1302 - DNA, 50 bp, Unknown
  Description of Unknown: Mouse/Rat/Human CpG sequence
cgctaatgagctgtgcagcccattgatccggagaacacttcctaattaac

SEQ ID NO: 1303 - DNA, 50 bp, Unknown
  Description of Unknown: Mouse/Rat/Human CpG sequence
cggagcaggaagtgaccccagcttcccgggcccctctagcctggagtcag

SEQ ID NO: 1304 - DNA, 50 bp, Unknown
  Description of Unknown: Mouse/Rat/Human CpG sequence
gtctagctgctcttcggtgaagatggtctgcttgttccccatggtggccg

SEQ ID NO: 1305 - DNA, 50 bp, Unknown
  Description of Unknown: Mouse/Rat/Human CpG sequence
cgcaacacagggaaattattattgtcagaataataatggtttagcataat

SEQ ID NO: 1306 - DNA, 50 bp, Unknown
  Description of Unknown: Mouse/Rat/Human CpG sequence
gccctaccggctggagaagacgctgggcaaggggcagacaggtgcgtgcg

SEQ ID NO: 1307 - DNA, 50 bp, Unknown
  Description of Unknown: Mouse/Rat/Human CpG sequence
cgggttagtgtttcagtgttcttaactccaatctgcttgttcattgtaca

SEQ ID NO: 1308 - DNA, 50 bp, Unknown
  Description of Unknown: Mouse/Rat/Human CpG sequence
cggagcaacatcccctgtcacctggttgatatctcttgcggattaccctg

SEQ ID NO: 1309 - DNA, 50 bp, Unknown
  Description of Unknown: Mouse/Rat/Human CpG sequence
tgactaattacaccttgtcaatcaccggctatgaagacataaaaccagcg

SEQ ID NO: 1310 - DNA, 50 bp, Unknown
  Description of Unknown: Mouse/Rat/Human CpG sequence
tccaacaggctgcataatttttatgaccaattattccatttgtaatgacg

SEQ ID NO: 1311 - DNA, 50 bp, Unknown
  Description of Unknown: Mouse/Rat/Human CpG sequence
attacttagtgagcacatcatcatttatttgtaattagcagcgaggagcg

SEQ ID NO: 1312 - DNA, 50 bp, Unknown
  Description of Unknown: Mouse/Rat/Universal CpG sequence
cggccctgactcacgtgcttccggtttgaaggcaaaaagtgtgcctgggt

SEQ ID NO: 1313 - DNA, 50 bp, Unknown
  Description of Unknown: Mouse/Rat/Universal CpG sequence
taggcctctctggtatctctgttctttggcagagcctaacaaagtgttcg

SEQ ID NO: 1314 - DNA, 50 bp, Unknown
  Description of Unknown: Mouse/Rat/Universal CpG sequence
cggggagtatgtgtgtaaggtttccaattatattggtgaagctaaccagt

SEQ ID NO: 1315 - DNA, 50 bp, Unknown
  Description of Unknown: Mouse/Rat/Universal CpG sequence
cggctctcaggagcgaccctacttcatgtcgcccgagctgagagacatcc

SEQ ID NO: 1316 - DNA, 50 bp, Unknown
  Description of Unknown: Mouse/Rat/Universal CpG sequence
gccctcagccttgtccttctggaaagctcagagacatctgctgtgtcacg

SEQ ID NO: 1317 - DNA, 50 bp, Unknown
  Description of Unknown: Mouse/Rat/Universal CpG sequence
cgcactgaaactttgccaagagtgcgcgggcccgacaggctctgtgtcat

SEQ ID NO: 1318 - DNA, 50 bp, Unknown
  Description of Unknown: Mouse/Rat CpG sequence
aatgtgagagccctgaggtggacgaggtgtttgccctgaccccccagacg

SEQ ID NO: 1319 - DNA, 50 bp, Unknown
  Description of Unknown: Mouse/Rat CpG sequence
cggcgcattcggcaagagctgcctttcatggccacagagaacatcatcat

SEQ ID NO: 1320 - DNA, 50 bp, Unknown
  Description of Unknown: Mouse/Rat CpG sequence
ggttagccgacacctctgctctgtggaattttaattaacttctctcatcg

SEQ ID NO: 1321 - DNA, 50 bp, Unknown
  Description of Unknown: Mouse/Rat CpG sequence
atgcattctttctgaaagtatcaagacggcgccaggcagctcagtgttcg

SEQ ID NO: 1322 - DNA, 50 bp, Unknown
  Description of Unknown: Mouse/Rat CpG sequence
atcaggagggcagcctgcaaatgtcagcgcccggagagtcccccactccg

SEQ ID NO: 1323 - DNA, 50 bp, Unknown
  Description of Unknown: Mouse/Rat CpG sequence
tgtcacgctcagctgtgcccagagcgtgaggctggcagcgcctttaatcg

SEQ ID NO: 1324 - DNA, 50 bp, Unknown
  Description of Unknown: Mouse/Rat CpG sequence
gggtgctcatgctcaagtacttcatgtgcctggtggtgggcatcacgtcg

SEQ ID NO: 1325 - DNA, 50 bp, Unknown
  Description of Unknown: Mouse/Rat CpG sequence
cgccccactttcaaatcaaaatggctcaagccccaggccctgggcgggag

SEQ ID NO: 1326 - DNA, 50 bp, Unknown
  Description of Unknown: Mouse/Rat CpG sequence
ttacttccagtgaatgctatccatcgagcatattttgtagcttctcttcg

SEQ ID NO: 1327 - DNA, 50 bp, Unknown
  Description of Unknown: Mouse/Rat CpG sequence
cgcccgctgttggaggaagaaacggagactcaacatcctggaggacccca

SEQ ID NO: 1328 - DNA, 50 bp, Unknown
  Description of Unknown: Mouse/Human/Universal CpG sequence
gaacaaggaggccagagcagctaatgggaaacatgtgattctgccttgcg

SEQ ID NO: 1329 - DNA, 50 bp, Unknown
  Description of Unknown: Mouse/Human/Universal CpG sequence
gtgttttggcaactctaagttacctaaattagttttgatcaacactgtcg

SEQ ID NO: 1330 - DNA, 50 bp, Unknown
  Description of Unknown: Mouse/Human/Universal CpG sequence
ctggcatagaggctggtaccccgcctggtagagatgccacactcgctccg

SEQ ID NO: 1331 - DNA, 50 bp, Unknown
  Description of Unknown: Mouse/Human/Universal CpG sequence
cgtgtcggctgcttcactataaagcacacagaaaaatcaagatacacaag

SEQ ID NO: 1332 - DNA, 50 bp, Unknown
  Description of Unknown: Mouse/Human/Universal CpG sequence
cacttttcatttttgggtattaacaatcagtccaacctgacagacatgcg

SEQ ID NO: 1333 - DNA, 50 bp, Unknown
  Description of Unknown: Mouse/Human/Universal CpG sequence
gaaagcacttgctaaaatctgatctgttacttcagcagctttcagactcg

SEQ ID NO: 1334 - DNA, 50 bp, Unknown
  Description of Unknown: Mouse/Human/Universal CpG sequence
tttaataacagccactcacagcccaacgccgtgtttatattttacattcg

SEQ ID NO: 1335 - DNA, 50 bp, Unknown
  Description of Unknown: Mouse/Human/Universal CpG sequence
ttggaatccagctgggggtttccagatggggacatcactgtagggggacg

SEQ ID NO: 1336 - DNA, 50 bp, Unknown
  Description of Unknown: Mouse/Human/Universal CpG sequence
cggtattgattagtttggcatagacagatgcagcagtttagagcaaaatc

SEQ ID NO: 1337 - DNA, 50 bp, Unknown
  Description of Unknown: Mouse/Human/Universal CpG sequence
cgtctgacccgtctggtttccaggagcaaccagacatgatgtaacaccca

SEQ ID NO: 1338 - DNA, 50 bp, Unknown
  Description of Unknown: Mouse/Human/Universal CpG sequence
cgcatgaaaattaactggtgaggggcctcattgctatttttaaattgtag

SEQ ID NO: 1339 - DNA, 50 bp, Unknown
  Description of Unknown: Mouse/Human/Universal CpG sequence
cgggggcggagctctgcctgccaactgaggggatacagtctctcagtgca

SEQ ID NO: 1340 - DNA, 50 bp, Unknown
  Description of Unknown: Mouse/Human/Universal CpG sequence
cgggctgctaatatgatttaccagtctacagtcatgcacaataagtgtga

SEQ ID NO: 1341 - DNA, 50 bp, Unknown
  Description of Unknown: Mouse/Human/Universal CpG sequence
cggctgtgctgcctgttgaccatcccgcccagggtccaccggcgatccag

SEQ ID NO: 1342 - DNA, 50 bp, Unknown
  Description of Unknown: Mouse/Human/Universal CpG sequence
ccgcaacatctctgtggagacagccagtctggatgtctatgccaagtacg

SEQ ID NO: 1343 - DNA, 50 bp, Unknown
  Description of Unknown: Mouse/Human/Universal CpG sequence
ggctgcacggacaagattgtctgaggctcttttcacagcatttcctgccg

SEQ ID NO: 1344 - DNA, 50 bp, Unknown
  Description of Unknown: Mouse/Human/Universal CpG sequence
cgacgctctgcctaaattaaaaagcaaccaatcggaacggccggaagggg

SEQ ID NO: 1345 - DNA, 50 bp, Unknown
  Description of Unknown: Mouse/Human/Universal CpG sequence
tcatccttgaacaccacgctgccttcaactagtgcctggtcatccattcg

SEQ ID NO: 1346 - DNA, 50 bp, Unknown
  Description of Unknown: Mouse/Human/Universal CpG sequence
tcgtaaaaggtgaacttttgaacttggaaagcgccctggagcaattagcg

SEQ ID NO: 1347 - DNA, 50 bp, Unknown
  Description of Unknown: Mouse/Human/Universal CpG sequence
cgcagcagctcatgaatatgaaacgcccatgatgccacctcagtggactt

SEQ ID NO: 1348 - DNA, 50 bp, Unknown
  Description of Unknown: Mouse/Human/Universal CpG sequence
gctcttcaatgctgattattttatttgcagccataattatatttctttcg

SEQ ID NO: 1349 - DNA, 50 bp, Unknown
  Description of Unknown: Mouse/Human/Universal CpG sequence
cgggagcagagagcaggtcatcaacggcgacaaggacattcaatgatgca

SEQ ID NO: 1350 - DNA, 50 bp, Unknown
  Description of Unknown: Mouse/Human/Universal CpG sequence
acactcactctgctgtgacctaataaggtgatggtgctatacttcagacg

SEQ ID NO: 1351 - DNA, 50 bp, Unknown
  Description of Unknown: Mouse/Human/Universal CpG sequence
gcggaggagttcaagcgcaagcacaagaaggacattgggcccaacaagcg

SEQ ID NO: 1352 - DNA, 50 bp, Unknown
  Description of Unknown: Mouse/Human/Universal CpG sequence
aggggattttctccagtgtttctgattaaccctgttacataacccgctcg

SEQ ID NO: 1353 - DNA, 50 bp, Unknown
  Description of Unknown: Mouse/Human/Universal CpG sequence
cgccgccgggatgagccgccccctggacaccagcctgcgcctcaagacct

SEQ ID NO: 1354 - DNA, 50 bp, Unknown
  Description of Unknown: Mouse/Human/Universal CpG sequence
tttggagcgatttatcactttgatttggagatcttgtcagatggcaatcg

SEQ ID NO: 1355 - DNA, 50 bp, Unknown
  Description of Unknown: Mouse/Human/Universal CpG sequence
ccgagagacccaagggaatgattcggtcaggatccttccgagaccccacg

SEQ ID NO: 1356 - DNA, 50 bp, Unknown
  Description of Unknown: Mouse/Human/Universal CpG sequence
ttatactttccttcatatcatttgttctgtcaggtgttccctggccatcg

SEQ ID NO: 1357 - DNA, 50 bp, Unknown
  Description of Unknown: Mouse/Human/Universal CpG sequence
cgaaggcacgatatgcgtgtccatccttaccaaaggattgtgaccgcaga

SEQ ID NO: 1358 - DNA, 50 bp, Unknown
  Description of Unknown: Mouse/Human/Universal CpG sequence
ccgcattatcaatgaccgggagatgagggacgccataatcctcatcttcg

SEQ ID NO: 1359 - DNA, 50 bp, Unknown
  Description of Unknown: Mouse/Human/Universal CpG sequence
cctcggatattattcccatttaccagggcaaaactcaattccattgcacg

SEQ ID NO: 1360 - DNA, 50 bp, Unknown
  Description of Unknown: Mouse/Human/Universal CpG sequence
tcaccctttacctggagcaaaccaaagcctggccacacccctatatttcg

SEQ ID NO: 1361 - DNA, 50 bp, Unknown
  Description of Unknown: Mouse/Human/Universal CpG sequence
gaggtagacacggtcacattcgggggggcatctgagtctggcatcttccg

SEQ ID NO: 1362 - DNA, 50 bp, Unknown
  Description of Unknown: Mouse/Human/Universal CpG sequence
cgccaagtcccagaaggaaaacccgctttttagcgggtagaggatcaaat

SEQ ID NO: 1363 - DNA, 50 bp, Unknown
  Description of Unknown: Mouse/Human/Universal CpG sequence
cggcgtggacaccccgcaagccggctatttcgggctcttccactactgca

SEQ ID NO: 1364 - DNA, 50 bp, Unknown
  Description of Unknown: Mouse/Human/Universal CpG sequence
cgtccaggctgtggagggagacaaaaccgtgagcctcctggttaatgcca

SEQ ID NO: 1365 - DNA, 50 bp, Unknown
  Description of Unknown: Mouse/Human/Universal CpG sequence
ttaacctacccaacagcccgtgaagagttaagtaaatgcggagagagtcg

SEQ ID NO: 1366 - DNA, 50 bp, Unknown
  Description of Unknown: Mouse/Human/Universal CpG sequence
cgggggagcacggggagaaaaatcaatgtctctcaaaatatttgcaaaat

SEQ ID NO: 1367 - DNA, 50 bp, Unknown
  Description of Unknown: Mouse/Human/Universal CpG sequence
cggcacattctggagagcgagaagtgccaactccagagccaggtggagca

SEQ ID NO: 1368 - DNA, 50 bp, Unknown
  Description of Unknown: Mouse/Human/Universal CpG sequence
tttgacttaaagtgtgtgctatttattatagcaaacatcaacagccttcg

SEQ ID NO: 1369 - DNA, 50 bp, Unknown
  Description of Unknown: Mouse/Human/Universal CpG sequence
tcagaacaaaatgccgaccggaagtgcagctgcaggaatgactccctccg

SEQ ID NO: 1370 - DNA, 50 bp, Unknown
  Description of Unknown: Mouse/Human/Universal CpG sequence
gaggctgatggagaacaggcactgaacgctaatccctttttctatttccg

SEQ ID NO: 1371 - DNA, 50 bp, Unknown
  Description of Unknown: Mouse/Human/Universal CpG sequence
cttgcgcgacggagagcagaagttgcccaggttgaccgagttaaacatcg

SEQ ID NO: 1372 - DNA, 50 bp, Unknown
  Description of Unknown: Mouse/Human/Universal CpG sequence
gctcggtccatttctgggcgctgcaagatcagcagaaacctgagaaagcg

SEQ ID NO: 1373 - DNA, 50 bp, Unknown
  Description of Unknown: Mouse/Human/Universal CpG sequence
cggtattgttctctattgctgtagaaagactggttattagccataaatga

SEQ ID NO: 1374 - DNA, 50 bp, Unknown
  Description of Unknown: Mouse/Human/Universal CpG sequence
aggggtatgatgtttgcaatgcatgcatttcagcaggtcccattagtacg

SEQ ID NO: 1375 - DNA, 50 bp, Unknown
  Description of Unknown: Mouse/Human/Universal CpG sequence
cggcggctcaacgtccacggagccccaggaatacccacccgctgcccaga

SEQ ID NO: 1376 - DNA, 50 bp, Unknown
  Description of Unknown: Mouse/Human/Universal CpG sequence
cggggctgtgagtttcaaattaaccttccgctttgttgctgtgtaatgtg

SEQ ID NO: 1377 - DNA, 50 bp, Unknown
  Description of Unknown: Mouse/Human/Universal CpG sequence
cgcccagggccgcctccgccccgctttggcccatctgccatcccctggcc

SEQ ID NO: 1378 - DNA, 50 bp, Unknown
  Description of Unknown: Mouse/Human/Universal CpG sequence
ttcggatcgcagagctttcagacagtctcaactgatagacagacacatcg

SEQ ID NO: 1379 - DNA, 50 bp, Unknown
  Description of Unknown: Mouse/Human/Universal CpG sequence
aagtcaccggaggctctatgatgtgaaatgtacaatcgaattagaactcg

SEQ ID NO: 1380 - DNA, 50 bp, Unknown
  Description of Unknown: Mouse/Human/Universal CpG sequence
cgggagcataaagcagaaaaaaaattaatggaaaggcatttcacctcctc

SEQ ID NO: 1381 - DNA, 50 bp, Unknown
  Description of Unknown: Mouse/Human/Universal CpG sequence
ctggactatgttccggaaacagtatacagagttgccagacactatagtcg

SEQ ID NO: 1382 - DNA, 50 bp, Unknown
  Description of Unknown: Mouse/Human/Universal CpG sequence
cgagtcctcaaacccgggcacgtaggagtcgtcatacatgggggagtccg

SEQ ID NO: 1383 - DNA, 50 bp, Unknown
  Description of Unknown: Mouse/Human/Universal CpG sequence
cgctgcctattttcgcatgtggatttcagtggcgatggtaaaagcagtgg

SEQ ID NO: 1384 - DNA, 50 bp, Unknown
  Description of Unknown: Mouse/Human/Universal CpG sequence
acattttgctaattttagttttacggtggggtaatagcacatgccatacg

SEQ ID NO: 1385 - DNA, 50 bp, Unknown
  Description of Unknown: Mouse/Human/Universal CpG sequence
cttgggagcacagtagttatcgggagcgtcgcctccggcgtgggctctcg

SEQ ID NO: 1386 - DNA, 50 bp, Unknown
  Description of Unknown: Mouse/Human/Universal CpG sequence
atttgatgccatcaaagggctgtagattgaaaccagatgtgctcgcctcg

SEQ ID NO: 1387 - DNA, 50 bp, Unknown
  Description of Unknown: Mouse/Human/Universal CpG sequence
tttgctggcttgttaattttatccccactaactgtgatttctgatagccg

SEQ ID NO: 1388 - DNA, 50 bp, Unknown
  Description of Unknown: Mouse/Human/Universal CpG sequence
gggcctgtgacagctgaaatgattgcacacaattgccagtcagtcatgcg

SEQ ID NO: 1389 - DNA, 50 bp, Unknown
  Description of Unknown: Mouse/Human/Universal CpG sequence
cctgatgaagattgatcacctttctactgccctccccgggtatgtgaacg

SEQ ID NO: 1390 - DNA, 50 bp, Unknown
  Description of Unknown: Mouse/Human/Universal CpG sequence
cgtgccgacaggcagaccaggagctgctgccacatgaatcacttgaactt

SEQ ID NO: 1391 - DNA, 50 bp, Unknown
  Description of Unknown: Mouse/Human CpG sequence
attttctgtctgtgaaagcctttcttcccacctctgttcagattagcccg

SEQ ID NO: 1392 - DNA, 50 bp, Unknown
  Description of Unknown: Mouse/Human CpG sequence
cgctgccgtacaggtcactggccacggaaaggctatcctctgacccccag

SEQ ID NO: 1393 - DNA, 50 bp, Unknown
  Description of Unknown: Mouse/Human CpG sequence
ccagatcggcatgaagaggctcaaggtgcagctgaagcggcccaaagacg

SEQ ID NO: 1394 - DNA, 50 bp, Unknown
  Description of Unknown: Mouse/Human CpG sequence
cgggggtccccagtccccgggccacggatccaccttcccatgtaagaccc

SEQ ID NO: 1395 - DNA, 50 bp, Unknown
  Description of Unknown: Mouse/Human CpG sequence
gccatcaaaaggatatcacagctcattttggtggaagggtttccacgtcg

SEQ ID NO: 1396 - DNA, 50 bp, Unknown
  Description of Unknown: Mouse/Human CpG sequence
tgcctttgttttgctccagagttcgctccaaatgctcatcttcttcttcg

SEQ ID NO: 1397 - DNA, 50 bp, Unknown
  Description of Unknown: Mouse/Human CpG sequence
cgctgggagcaataagtccatttaaaagccctttatttaaaaggaacaaa

SEQ ID NO: 1398 - DNA, 50 bp, Unknown
  Description of Unknown: Mouse/Human CpG sequence
ttagcccccttatctgctgagcaatatagtggcagggctgacctctttcg

SEQ ID NO: 1399 - DNA, 50 bp, Unknown
  Description of Unknown: Mouse/Human CpG sequence
attttcagtttttaaaagccaccttagcccgccatattgaaactggcacg

SEQ ID NO: 1400 - DNA, 50 bp, Unknown
  Description of Unknown: Mouse/Human CpG sequence
cgggttgtgtttctttaacccctggggcctgttgacacagattagtatcg

SEQ ID NO: 1401 - DNA, 50 bp, Unknown
  Description of Unknown: Mouse/Human CpG sequence
tcctgactcagagattccactgatgatttccaggaactaccaaagccacg

SEQ ID NO: 1402 - DNA, 50 bp, Unknown
  Description of Unknown: Mouse/Human CpG sequence
gcatgacaaattatgaaacacatactgtgaaaattatggactctgtcacg

SEQ ID NO: 1403 - DNA, 50 bp, Unknown
  Description of Unknown: Mouse/Human CpG sequence
aagatttatggctttgaagtttgccgctacccaatcatcaaagaatagcg

SEQ ID NO: 1404 - DNA, 50 bp, Unknown
  Description of Unknown: Mouse/Human CpG sequence
atgaatcaagaagactgaccagaaactgactcccctgataactaaggacg

SEQ ID NO: 1405 - DNA, 50 bp, Unknown
  Description of Unknown: Mouse/Human CpG sequence
aggggcttcgggcaattcatcatggaaattgggtttcttagcagacatcg

SEQ ID NO: 1406 - DNA, 50 bp, Unknown
  Description of Unknown: Mouse/Human CpG sequence
cggcctgcctgcttttccagctggagctgttcattcagaacaattagcat

SEQ ID NO: 1407 - DNA, 50 bp, Unknown
  Description of Unknown: Mouse/Human CpG sequence
gccaggagttgccactgactatggaaattgccacaccagggctataaacg

SEQ ID NO: 1408 - DNA, 50 bp, Unknown
  Description of Unknown: Mouse/Human CpG sequence
acgcttttggtcaactgtactctgtagaaaaaacaggcacacttgtctcg

SEQ ID NO: 1409 - DNA, 50 bp, Unknown
  Description of Unknown: Mouse/Human CpG sequence
cggatcaaagaacagcagcagttttgatttgtgttaattttgcgtgtaca

SEQ ID NO: 1410 - DNA, 50 bp, Unknown
  Description of Unknown: Mouse/Human CpG sequence
agtaggcagctcctgtgctaccgtattataggattccagcgctgtcgtcg

SEQ ID NO: 1411 - DNA, 50 bp, Unknown
  Description of Unknown: Mouse/Human CpG sequence
ctccatgaggtcacactccatgctactgtggtattcaaatttccgagtcg

SEQ ID NO: 1412 - DNA, 50 bp, Unknown
  Description of Unknown: Mouse/Human CpG sequence
cattccgaatatagagaacctcaatctctttgtccgtggtgttaacaccg

SEQ ID NO: 1413 - DNA, 50 bp, Unknown
  Description of Unknown: Mouse/Human CpG sequence
cgctgcctttgctttaaaacagtattacttgcggtgagtagtagtgactt

SEQ ID NO: 1414 - DNA, 50 bp, Unknown
  Description of Unknown: Mouse/Human CpG sequence
ttaactaacaactcattagcttagttgatgtttttgtcaatattaattcg

SEQ ID NO: 1415 - DNA, 50 bp, Unknown
  Description of Unknown: Mouse/Human CpG sequence
agccaaatgatcaccttcacctttgctaatggaggcgtggccaccatgcg

SEQ ID NO: 1416 - DNA, 50 bp, Unknown
  Description of Unknown: Mouse/Human CpG sequence
actcatctccaggaaggacttcgagaccctctacaatgactgcaccaacg

SEQ ID NO: 1417 - DNA, 50 bp, Unknown
  Description of Unknown: Mouse/Human CpG sequence
cgttgctgatgacagagccattctcactgggcgacctgctggaggtaacc

SEQ ID NO: 1418 - DNA, 50 bp, Unknown
  Description of Unknown: Mouse/Human CpG sequence
cggctaagagcaggtgagtcacagcaccggtttatatctttatgacataa

SEQ ID NO: 1419 - DNA, 50 bp, Unknown
  Description of Unknown: Mouse/Human CpG sequence
cggggttgatcttcccgtaagattcacagcaacacagcctcttgacttcc

SEQ ID NO: 1420 - DNA, 50 bp, Unknown
  Description of Unknown: Mouse/Human CpG sequence
ggcagttgcaatcagtttccgaaaggtcagccaaggtcctccggctctcg

SEQ ID NO: 1421 - DNA, 50 bp, Unknown
  Description of Unknown: Mouse/Human CpG sequence
tcataattgtaactgagggtgacagggtcaccttgagccccagatgctcg

SEQ ID NO: 1422 - DNA, 50 bp, Unknown
  Description of Unknown: Mouse/Human CpG sequence
ggatccctaataggaaatgcttcaacaaacaacaatgcagcatttgatcg

SEQ ID NO: 1423 - DNA, 50 bp, Unknown
  Description of Unknown: Mouse/Human CpG sequence
gtaaaagcacgttcatttccaggcactctcattcatagagccagcgggcg

SEQ ID NO: 1424 - DNA, 50 bp, Unknown
  Description of Unknown: Mouse/Human CpG sequence
ctgtcactgcattcctgctccccctccctctagctgggtttgtcaagtcg

SEQ ID NO: 1425 - DNA, 50 bp, Unknown
  Description of Unknown: Mouse/Human CpG sequence
gtgtaatattaatagtcatgaatatctgctattaggaggctccaggaacg

SEQ ID NO: 1426 - DNA, 50 bp, Unknown
  Description of Unknown: Mouse/Human CpG sequence
ggagcagccattaaaatgtcgcccggagacagtaataaaaggctcggacg

SEQ ID NO: 1427 - DNA, 50 bp, Unknown
  Description of Unknown: Mouse/Human CpG sequence
cggaaaataaagttcagagctgatcaaatttgaaaacagatgtcgaatcg

SEQ ID NO: 1428 - DNA, 50 bp, Unknown
  Description of Unknown: Mouse/Human CpG sequence
cggtaaatagctgccaaattatggatcatgccgaagtgtcacaactgcac

SEQ ID NO: 1429 - DNA, 50 bp, Unknown
  Description of Unknown: Mouse/Human CpG sequence
cggcggagagaacagccagttgtttaaaatccttctagagcagtttctaa

SEQ ID NO: 1430 - DNA, 50 bp, Unknown
  Description of Unknown: Mouse/Human CpG sequence
ccagctcgtccctttcaggggggactcatgcatcaaacttcaattttccg

SEQ ID NO: 1431 - DNA, 50 bp, Unknown
  Description of Unknown: Mouse/Human CpG sequence
cgccctattttccaaagtctaaaatggacatatgttataactgtcttggg

SEQ ID NO: 1432 - DNA, 50 bp, Unknown
  Description of Unknown: Mouse/Human CpG sequence
cgccgtgtggtgtaaacaaaccctggatattttatatgaattaaatgtgt

SEQ ID NO: 1433 - DNA, 50 bp, Unknown
  Description of Unknown: Mouse/Human CpG sequence
ttcatttctcgctctacctcctgttgcataaaatgatgcgctgaagagcg

SEQ ID NO: 1434 - DNA, 50 bp, Unknown
  Description of Unknown: Mouse/Human CpG sequence
ttctatgcacaggatggctcttgctcacccgagcctcacaaagataatcg

SEQ ID NO: 1435 - DNA, 50 bp, Unknown
  Description of Unknown: Mouse/Human CpG sequence
tattttgctgtgcaaaattgttttatatcttgagttactaactaaccacg

SEQ ID NO: 1436 - DNA, 50 bp, Unknown
  Description of Unknown: Mouse/Human CpG sequence
cttggccatatatgatgatggcatcacttccctcactgccacaagagtcg

SEQ ID NO: 1437 - DNA, 50 bp, Unknown
  Description of Unknown: Mouse/Human CpG sequence
gggcctcgatgagagagacgatctccttggcgaagggcaggttctcctcg

SEQ ID NO: 1438 - DNA, 50 bp, Unknown
  Description of Unknown: Mouse/Human CpG sequence
cagcttggtggaggccttatccactcccacttgtcctgtttggagggacg

SEQ ID NO: 1439 - DNA, 50 bp, Unknown
  Description of Unknown: Mouse/Human CpG sequence
ccgggaatgcgatgcatttgtgtagcgtgtgcaaatgggcgccgcggtcg

SEQ ID NO: 1440 - DNA, 50 bp, Unknown
  Description of Unknown: Mouse/Human CpG sequence
cgtcgccctcaattccaccgcctatgatccagtgaggcatttctcgacct

SEQ ID NO: 1441 - DNA, 50 bp, Unknown
  Description of Unknown: Mouse/Human CpG sequence
agcatttcattcattcattcattcattcatttcccggagctccgctagcg

SEQ ID NO: 1442 - DNA, 50 bp, Unknown
  Description of Unknown: Mouse/Human CpG sequence
cggggactatcttgccagacagcactctggagcctgcctaccgcccactc

SEQ ID NO: 1443 - DNA, 50 bp, Unknown
  Description of Unknown: Mouse/Human CpG sequence
ataactaccaggagggtttgatgggggattccgccatgtcaatgatgtcg

SEQ ID NO: 1444 - DNA, 50 bp, Unknown
  Description of Unknown: Mouse/Human CpG sequence
atccctccttagtcctctatgaacttcatcaaaatgcctccttacattcg

SEQ ID NO: 1445 - DNA, 50 bp, Unknown
  Description of Unknown: Mouse/Human CpG sequence
ggatcatggcggatggccccaggtgtaagcgcagaaagcaggcgaacccg

SEQ ID NO: 1446 - DNA, 50 bp, Unknown
  Description of Unknown: Mouse/Human CpG sequence
ccataaagtccttctgattcccgcatctcttcattcattcttgctaaacg

SEQ ID NO: 1447 - DNA, 50 bp, Unknown
  Description of Unknown: Mouse/Human CpG sequence
agataaatagcagagtgtcctcctcaaaaatatgattaataccctactcg

SEQ ID NO: 1448 - DNA, 50 bp, Unknown
  Description of Unknown: Mouse/Human CpG sequence
cggcatctgactgtacctgtcttgttctctgcagcatctgtctgctacac

SEQ ID NO: 1449 - DNA, 50 bp, Unknown
  Description of Unknown: Mouse/Human CpG sequence
cggcggcggcagccaactgctccatatttggcttctattacacatttaca

SEQ ID NO: 1450 - DNA, 50 bp, Unknown
  Description of Unknown: Mouse/Human CpG sequence
cgcactgcaggagaaggacacacagaccaaactggaggcaaggccaccag

SEQ ID NO: 1451 - DNA, 50 bp, Unknown
  Description of Unknown: Mouse/Human CpG sequence
cgctcacaccaaaagccacacacagaaaaccaacaacgtgggatgggagg

SEQ ID NO: 1452 - DNA, 50 bp, Unknown
  Description of Unknown: Mouse/Human CpG sequence
cgttcatcagtgtcaatggcactgaaccctgtttcaggcccatcagtgtt

SEQ ID NO: 1453 - DNA, 50 bp, Unknown
  Description of Unknown: Mouse/Human CpG sequence
gggaggcgtcgacgtcataatccccggaacgtaaacattgttgccgatcg

SEQ ID NO: 1454 - DNA, 50 bp, Unknown
  Description of Unknown: Mouse/Human CpG sequence
aggacctaataggtttcgctctttttggagctcatcagctgcaggtaacg

SEQ ID NO: 1455 - DNA, 50 bp, Unknown
  Description of Unknown: Mouse/Human CpG sequence
cgctggagatctctgttcagtctgtggtgacaacatcggagctgtcaacg

SEQ ID NO: 1456 - DNA, 50 bp, Unknown
  Description of Unknown: Mouse/Human CpG sequence
tttggtccattgtcaagaaaagccttgcgaggaacccaatggtgttctcg

SEQ ID NO: 1457 - DNA, 50 bp, Unknown
  Description of Unknown: Mouse/Human CpG sequence
ggaggagttcaagcgcaagcacaagaaggacattgggcccaacaagcgcg

SEQ ID NO: 1458 - DNA, 50 bp, Unknown
  Description of Unknown: Mouse/Human CpG sequence
cgtaccccacacaggagaagtttgatgttgacaaacttctggtggcagcg

SEQ ID NO: 1459 - DNA, 50 bp, Unknown
  Description of Unknown: Mouse/Human CpG sequence
cggttaacctcgcagtactaaaactgaatgaacaaggcctgttggacaaa

SEQ ID NO: 1460 - DNA, 50 bp, Unknown
  Description of Unknown: Mouse/Human CpG sequence
gggtcaagtttcagcggcactccgcccccagggtaggtgtgaaagacacg

SEQ ID NO: 1461 - DNA, 50 bp, Unknown
  Description of Unknown: Mouse/Human CpG sequence
cagaactgtcaaccatgcagagtgaaaggatatcccaatagaattacccg

SEQ ID NO: 1462 - DNA, 50 bp, Unknown
  Description of Unknown: Mouse/Human CpG sequence
agttgaagtgtcagattacattggctattctatttccaaagggccccgcg

SEQ ID NO: 1463 - DNA, 50 bp, Unknown
  Description of Unknown: Mouse/Human CpG sequence
gggaacccaagatgggccaagtggtgtatgtgccggtcaagacgggctcg

SEQ ID NO: 1464 - DNA, 50 bp, Unknown
  Description of Unknown: Mouse/Human CpG sequence
cgcgcaggggcagtcattcagatgaaattccagtccccggccagagacac

SEQ ID NO: 1465 - DNA, 50 bp, Unknown
  Description of Unknown: Mouse/Human CpG sequence
cggggccagtcttcagcattaataaaagattccaagaacagggtgacctt

SEQ ID NO: 1466 - DNA, 50 bp, Unknown
  Description of Unknown: Mouse/Human CpG sequence
cgcgctctccgtttgtgaacccattaccaaagagctatagctgtactgat

SEQ ID NO: 1467 - DNA, 50 bp, Unknown
  Description of Unknown: Mouse/Human CpG sequence
cggggcaagtgtcttcatgaacccagaggatgtccgggaagcactacaag

SEQ ID NO: 1468 - DNA, 50 bp, Unknown
  Description of Unknown: Mouse/Human CpG sequence
ccatggtgactttcttcgggggcctcttcatcatcttgctctggcggacg

SEQ ID NO: 1469 - DNA, 50 bp, Unknown
  Description of Unknown: Mouse/Human CpG sequence
tacatggacagcctagacattgtcaccagcaaggtgtcaagcctctttcg

SEQ ID NO: 1470 - DNA, 50 bp, Unknown
  Description of Unknown: Mouse/Human CpG sequence
cgggaagctaaatagttgtaccttggactaccttcccacaagtgcaggga

SEQ ID NO: 1471 - DNA, 50 bp, Unknown
  Description of Unknown: Mouse/Human CpG sequence
cgaccgtcatctgtaaaaaatgtctcagtgagagataatcatcggaaact

SEQ ID NO: 1472 - DNA, 50 bp, Unknown
  Description of Unknown: Mouse/Human CpG sequence
ccactgggcggccggattgttcaggcggaataataaaacctgccaatccg

SEQ ID NO: 1473 - DNA, 50 bp, Unknown
  Description of Unknown: Mouse/Human CpG sequence
ttccccctgaacagtaacctatttgaatatgattaaagggtttcattacg

SEQ ID NO: 1474 - DNA, 50 bp, Unknown
  Description of Unknown: Mouse/Human CpG sequence
cggtctttggcaatcaggtcctgggcctctaatacatggatccgaagcac

SEQ ID NO: 1475 - DNA, 50 bp, Unknown
  Description of Unknown: Mouse/Human CpG sequence
ccaccttgatgcagtcctcgttggcgatgttgagcacgttggtctgcacg

SEQ ID NO: 1476 - DNA, 50 bp, Unknown
  Description of Unknown: Mouse/Human CpG sequence
cgggggagctggctccagccccaggatacaccgaggaaattagtttgtct

SEQ ID NO: 1477 - DNA, 50 bp, Unknown
  Description of Unknown: Mouse/Human CpG sequence
cgggcgattagcacccattgcatgaattatgaaacaataactttcggaag

SEQ ID NO: 1478 - DNA, 50 bp, Unknown
  Description of Unknown: Mouse/Human CpG sequence
aatattcatgaacaaagtctggggtgatcaatctatctttattgtctgcg

SEQ ID NO: 1479 - DNA, 50 bp, Unknown
  Description of Unknown: Mouse/Human CpG sequence
aagccaccagcattgccaagcccaagccgccaaccagaatgtagaagacg

SEQ ID NO: 1480 - DNA, 50 bp, Unknown
  Description of Unknown: Mouse/Human CpG sequence
cggtttccatagcaaccagccaacgggccactttctcagaacaattcccc

SEQ ID NO: 1481 - DNA, 50 bp, Unknown
  Description of Unknown: Mouse/Human CpG sequence
tgataataataggtttccctgaaagatacattgtaatccattcacatccg

SEQ ID NO: 1482 - DNA, 50 bp, Unknown
  Description of Unknown: Mouse/Human CpG sequence
ttgtcgattttgtttgcacagaggacggcgacagcttcctcaggctgtcg

SEQ ID NO: 1483 - DNA, 50 bp, Unknown
  Description of Unknown: Mouse/Human CpG sequence
actctaggtatttcaaatctgatgcttagaccactaagccatcccctccg

SEQ ID NO: 1484 - DNA, 50 bp, Unknown
  Description of Unknown: Mouse/Human CpG sequence
tttccacacgtggctcctcgctgctttgttgcctgggccagggaagggcg

SEQ ID NO: 1485 - DNA, 50 bp, Unknown
  Description of Unknown: Mouse/Human CpG sequence
cgggaaatcattaaacaggaagaaagtgtggatcctgactactgggagaa

SEQ ID NO: 1486 - DNA, 50 bp, Unknown
  Description of Unknown: Mouse/Human CpG sequence
cctgccaatcgctcctggcacgagctgggtaacaaatgcctgttacctcg

SEQ ID NO: 1487 - DNA, 50 bp, Unknown
  Description of Unknown: Mouse/Human CpG sequence
cctcccgctgcttcagcttgaacttcatgtttccaaagtgcatgatggcg

SEQ ID NO: 1488 - DNA, 50 bp, Unknown
  Description of Unknown: Mouse/Human CpG sequence
cgcaattaaagatgaactttgggtgaactaattgtctgaccaaggtaacg

SEQ ID NO: 1489 - DNA, 50 bp, Unknown
  Description of Unknown: Mouse/Human CpG sequence
aaataaagcaaatgaacccaccgaaaactgcttggcaaatatttttctcg

SEQ ID NO: 1490 - DNA, 50 bp, Unknown
  Description of Unknown: Mouse/Human CpG sequence
cgcaattgtattcaaatcaggaaacggacctaggatggtacagggatgtg

SEQ ID NO: 1491 - DNA, 50 bp, Unknown
  Description of Unknown: Mouse/Human CpG sequence
cgaaaacttcaggatgcagcagaacaactaaaacagtatgaaataaacgc

SEQ ID NO: 1492 - DNA, 50 bp, Unknown
  Description of Unknown: Mouse/Human CpG sequence
cgagaacaccatttcctacgagaccactgccgctgggtgcatattcaatt

SEQ ID NO: 1493 - DNA, 50 bp, Unknown
  Description of Unknown: Mouse/Human CpG sequence
cgccaagagaaagatcttggccgtcttcaggtagacatggatgaacttga

SEQ ID NO: 1494 - DNA, 50 bp, Unknown
  Description of Unknown: Mouse/Human CpG sequence
cggcgacggggcccatcagtaactattacgtggactcgctcatctctcac

SEQ ID NO: 1495 - DNA, 50 bp, Unknown
  Description of Unknown: Mouse/Human CpG sequence
tctcctgtacacatcatagccactagcaaaagtttacattcctatgcacg

SEQ ID NO: 1496 - DNA, 50 bp, Unknown
  Description of Unknown: Mouse/Human CpG sequence
gcagctgccatctgcactattgtttctattgctgatttattaaagtaccg

SEQ ID NO: 1497 - DNA, 50 bp, Unknown
  Description of Unknown: Mouse/Human CpG sequence
cggggccctctagaatctctaaagcaaatcaggctgaagaggggaaaacc

SEQ ID NO: 1498 - DNA, 50 bp, Unknown
  Description of Unknown: Mouse/Human CpG sequence
ctatagaaaaaccgccacagacggccgtggcagctgttgctaaggagacg

SEQ ID NO: 1499 - DNA, 50 bp, Unknown
  Description of Unknown: Mouse/Human CpG sequence
ttccgcggctattggattagtggccttcagggatgagctcagccagatcg

SEQ ID NO: 1500 - DNA, 50 bp, Unknown
  Description of Unknown: Mouse/Human CpG sequence
cctggagcatcagggcggtgccttggagggcaggatgatttcgggctgcg

SEQ ID NO: 1501 - DNA, 50 bp, Unknown
  Description of Unknown: Mouse/Human CpG sequence
cgggcaattcatcatggaaattgggtttcttagcagacatcgtgtgaatc

SEQ ID NO: 1502 - DNA, 50 bp, Unknown
  Description of Unknown: Mouse/Human CpG sequence
catcttgttggggctctgctggatggccatggtgatgagcgagatgtacg

SEQ ID NO: 1503 - DNA, 50 bp, Unknown
  Description of Unknown: Mouse/Human CpG sequence
acggcaatatggcgagaatgcctggcagcggggactgtaacaccagcgcg

SEQ ID NO: 1504 - DNA, 50 bp, Unknown
  Description of Unknown: Mouse/Human CpG sequence
aactatagctttaaggtatgcatactcatagccatctatatccagcttcg

SEQ ID NO: 1505 - DNA, 50 bp, Unknown
  Description of Unknown: Mouse/Human CpG sequence
tttgaactgaaaagctctcagtctaacttcaactcactcaaatccgagcg

SEQ ID NO: 1506 - DNA, 50 bp, Unknown
  Description of Unknown: Mouse/Human CpG sequence
cgcggcccacacctgggacaatgagcaggaacccaggtgagcagtttgtg

SEQ ID NO: 1507 - DNA, 50 bp, Unknown
  Description of Unknown: Mouse/Human CpG sequence
atttagtggcgggctcaatggcgtactctctgaaggtcacttcgcgcacg

SEQ ID NO: 1508 - DNA, 50 bp, Unknown
  Description of Unknown: Mouse/Human CpG sequence
cgaagcagtgggggctgccaaggaacatgatttactccttgagcatgcac

SEQ ID NO: 1509 - DNA, 50 bp, Unknown
  Description of Unknown: Mouse/Human CpG sequence
ttatccttttaattacaagctgtagacagggccaacttcgaaggtcttcg

SEQ ID NO: 1510 - DNA, 50 bp, Unknown
  Description of Unknown: Mouse/Human CpG sequence
cgcccagtgagaatggctctgtcatcagcaacgaatcagggaagcccagc

SEQ ID NO: 1511 - DNA, 50 bp, Unknown
  Description of Unknown: Mouse/Human CpG sequence
cgggcagctgctgtcaacagtagtgcggactcttgccacccagaggtagt

SEQ ID NO: 1512 - DNA, 50 bp, Unknown
  Description of Unknown: Mouse/Human CpG sequence
taccttgagcttcacttcctgatccaccttcagcaacgaggccatggccg

SEQ ID NO: 1513 - DNA, 50 bp, Unknown
  Description of Unknown: Mouse/Human CpG sequence
agtagtggaagagcccgaaatagccggcttgcggggtgtccacgccgtcg

SEQ ID NO: 1514 - DNA, 50 bp, Unknown
  Description of Unknown: Mouse/Human CpG sequence
attgcctttctaattgatggctccagcagtgttggagatagcaatttccg

SEQ ID NO: 1515 - DNA, 50 bp, Unknown
  Description of Unknown: Mouse/Human CpG sequence
tctcccacttttccataagcagaacaagaaccaaatcaaacgtcttaacg

SEQ ID NO: 1516 - DNA, 50 bp, Unknown
  Description of Unknown: Mouse/Human CpG sequence
cgacgccttccgggcgcacgccgagcagaactccaccgacaccttatcct

SEQ ID NO: 1517 - DNA, 50 bp, Unknown
  Description of Unknown: Mouse/Human CpG sequence
gatgacctaacacgctcacaccaaaagccacacacagaaaaccaacaacg

SEQ ID NO: 1518 - DNA, 50 bp, Unknown
  Description of Unknown: Mouse/Human CpG sequence
tccactgtgtctgtcctgtcttggggcacagcggcagaggcatgcccacg

SEQ ID NO: 1519 - DNA, 50 bp, Unknown
  Description of Unknown: Mouse/Human CpG sequence
cgtaacgctggcaatttgtagtacaaaaatggatgcttaattcatgtctt

SEQ ID NO: 1520 - DNA, 50 bp, Unknown
  Description of Unknown: Mouse/Human CpG sequence
cgggctaatgaggtaaactgaagcgagccctgtcccccctgacaggttta

SEQ ID NO: 1521 - DNA, 50 bp, Unknown
  Description of Unknown: Mouse/Human CpG sequence
cagtggttaatttgaaactacttcatgtcagtttctttcagagcaatacg

SEQ ID NO: 1522 - DNA, 50 bp, Unknown
  Description of Unknown: Mouse/Human CpG sequence
tcagcaccatctgcacaggctcatttgttgctcctgaggcagcccacacg

SEQ ID NO: 1523 - DNA, 50 bp, Unknown
  Description of Unknown: Mouse/Human CpG sequence
gggccgttctgttgagtgcacttgtctgacgtgactgttgaggtgatccg

SEQ ID NO: 1524 - DNA, 50 bp, Unknown
  Description of Unknown: Mouse/Human CpG sequence
ggtgttttataagagcctttttcttcattaaatggcattcattaagcacg

SEQ ID NO: 1525 - DNA, 50 bp, Unknown
  Description of Unknown: Mouse/Human CpG sequence
cggtcctgggcctgagcatccatggtgggattccagtcgctgtcataaaa

SEQ ID NO: 1526 - DNA, 50 bp, Unknown
  Description of Unknown: Mouse/Human CpG sequence
cggggcagccttcctgaccgactacaacaaccaggccgacaccacctggt

SEQ ID NO: 1527 - DNA, 50 bp, Unknown
  Description of Unknown: Mouse/Human CpG sequence
cgcacctgcggtccggaagttctcccctgaccttaagttgcttaaggatg

SEQ ID NO: 1528 - DNA, 50 bp, Unknown
  Description of Unknown: Mouse/Human CpG sequence
cgctctctttgttgcttatgccgataagcatgggtttccttggtgcagtg

SEQ ID NO: 1529 - DNA, 50 bp, Unknown
  Description of Unknown: Mouse/Human CpG sequence
cggccacgctccacaccacgatgaccagggtcatgaagcaggccaccagc

SEQ ID NO: 1530 - DNA, 50 bp, Unknown
  Description of Unknown: Mouse/Human CpG sequence
cgcttaaatatacacaggaggcaggagatcctataatccaacctcacatt

SEQ ID NO: 1531 - DNA, 50 bp, Unknown
  Description of Unknown: Mouse/Human CpG sequence
atgctgaagaccatcaacctacagaatgagggcttcacctgcaccatccg

SEQ ID NO: 1532 - DNA, 50 bp, Unknown
  Description of Unknown: Mouse/Human CpG sequence
ggggggtatctgtgtcccagagcctcatccccgacatcaaacccctggcg

SEQ ID NO: 1533 - DNA, 50 bp, Unknown
  Description of Unknown: Mouse/Human CpG sequence
cgcgcgctgccgtcccggatcagccagagagaccattaaaattttatgca

SEQ ID NO: 1534 - DNA, 50 bp, Unknown
  Description of Unknown: Mouse/Human CpG sequence
acctgagcagccttggcaaatgttggcccatggtagcggccaccaatgcg

SEQ ID NO: 1535 - DNA, 50 bp, Unknown
  Description of Unknown: Mouse/Human CpG sequence
cgtggctctcaaagttcagactcttctagtagctgtatgtatctcaatcc

SEQ ID NO: 1536 - DNA, 50 bp, Unknown
  Description of Unknown: Mouse/Human CpG sequence
cggtaagtaccactttactgttcataagaattgcagagcaatggtgctga

SEQ ID NO: 1537 - DNA, 50 bp, Unknown
  Description of Unknown: Mouse/Human CpG sequence
tgaggtgatggcaacggccaacttcggcaagatccagatcgggatttacg

SEQ ID NO: 1538 - DNA, 50 bp, Unknown
  Description of Unknown: Mouse/Human CpG sequence
ggttcagccaccttcaaatactgcatcaatggctcgtgcctctgcctgcg

SEQ ID NO: 1539 - DNA, 50 bp, Unknown
  Description of Unknown: Mouse/Human CpG sequence
tagctactgttgctcttgctgatgctgtagctcccgctgctcctgccgcg

SEQ ID NO: 1540 - DNA, 50 bp, Unknown
  Description of Unknown: Mouse/Human CpG sequence
cggccctggggcaaggacaactactggatgctcaaccccaacagcgagta

SEQ ID NO: 1541 - DNA, 50 bp, Unknown
  Description of Unknown: Mouse/Human CpG sequence
cgcctacctagaaacattttgaaatgccaagttgttttaaacttgtatga

SEQ ID NO: 1542 - DNA, 50 bp, Unknown
  Description of Unknown: Mouse/Human CpG sequence
gcaggccaaaaaacgctatttcatcctgctctcagctggctcttgtctcg

SEQ ID NO: 1543 - DNA, 50 bp, Unknown
  Description of Unknown: Mouse/Human CpG sequence
cgcacaataaaccctgtcatataaaagcaaactggataaaataacagaag

SEQ ID NO: 1544 - DNA, 50 bp, Unknown
  Description of Unknown: Mouse/Human CpG sequence
ctgcgggggtggggtggtggtagacgttggccgagctcttggccagcacg

SEQ ID NO: 1545 - DNA, 50 bp, Unknown
  Description of Unknown: Mouse/Human CpG sequence
cgaaagttattgtttcataattcatgcaatgggtgctaatcgcccgctcg

SEQ ID NO: 1546 - DNA, 50 bp, Unknown
  Description of Unknown: Mouse/Human CpG sequence
actcttctggcaaggcattgcaggacccctactttcttaaaattcatacg

SEQ ID NO: 1547 - DNA, 50 bp, Unknown
  Description of Unknown: Mouse/Human CpG sequence
cggaacaggacgccctctgatgtgagcatttgccaaaaatatctctgtcg

SEQ ID NO: 1548 - DNA, 50 bp, Unknown
  Description of Unknown: Mouse/Human CpG sequence
ttaagatcaaaatctgcgaggccgtgagcttgaagcccacagcctggtcg

SEQ ID NO: 1549 - DNA, 50 bp, Unknown
  Description of Unknown: Mouse/Human CpG sequence
gccatggcccagattctgccaattcgttttcaggagcatctccaggtgcg

SEQ ID NO: 1550 - DNA, 50 bp, Unknown
  Description of Unknown: Mouse/Human CpG sequence
gtttatcttggcactggcaagtacagcagtctcttcgatgtctggaaacg

SEQ ID NO: 1551 - DNA, 50 bp, Unknown
  Description of Unknown: Mouse/Human CpG sequence
cagttggaaatgattcaaagctgtggtttcacatgttatctgtaaaaacg

SEQ ID NO: 1552 - DNA, 50 bp, Unknown
  Description of Unknown: Mouse/Human CpG sequence
gggtgctccaggtgtttgccccagccccagacagccagtgggaggtgacg

SEQ ID NO: 1553 - DNA, 50 bp, Unknown
  Description of Unknown: Mouse/Human CpG sequence
cgccgctgtggctgagagcgaagtttcagagactcttatttaaactgggt

SEQ ID NO: 1554 - DNA, 50 bp, Unknown
  Description of Unknown: Mouse/Human CpG sequence
tttctgacttcttaacttgtcagcaaatcccagagttaaaaatgcacacg

SEQ ID NO: 1555 - DNA, 50 bp, Unknown
  Description of Unknown: Mouse/Human CpG sequence
tcagagcactgcggtatatactcatgtcatgagcatcataccactcatcg

SEQ ID NO: 1556 - DNA, 50 bp, Unknown
  Description of Unknown: Mouse/Human CpG sequence
cgatgtctgaacaagctattgaaactgtagcaatcaagtggactctggtt

SEQ ID NO: 1557 - DNA, 50 bp, Unknown
  Description of Unknown: Mouse/Human CpG sequence
ttattcttgtgtggccctcgtaacataaatgtaaatcttttatgctaacg

SEQ ID NO: 1558 - DNA, 50 bp, Unknown
  Description of Unknown: Mouse/Human CpG sequence
cgtccgatcctaatctccagctcaggcaggctcggccgccactagcatcc

SEQ ID NO: 1559 - DNA, 50 bp, Unknown
  Description of Unknown: Mouse/Human CpG sequence
catgcgatccaaggcgagggcgaggaagctagccaaaagtaagtctcccg

SEQ ID NO: 1560 - DNA, 50 bp, Unknown
  Description of Unknown: Mouse/Human CpG sequence
gcagccacacatccaaggctgacagggcgggcactctgccaagtcctgcg

SEQ ID NO: 1561 - DNA, 50 bp, Unknown
  Description of Unknown: Mouse/Human CpG sequence
gccccaatatccctgcctataacatgcaaacttgtgggaactatggatcg

SEQ ID NO: 1562 - DNA, 50 bp, Unknown
  Description of Unknown: Mouse/Human CpG sequence
gctgagagcttttgtgtttaatgaccttcagctaccgggaggcaaagccg

SEQ ID NO: 1563 - DNA, 50 bp, Unknown
  Description of Unknown: Mouse/Human CpG sequence
cgccgagctgcaaaccacacccgagtccgtccagctgcaggacagctggg

SEQ ID NO: 1564 - DNA, 50 bp, Unknown
  Description of Unknown: Mouse/Human CpG sequence
cgctttcagcaccaccatccacgtgcccaacattgccacaggagagcagc

SEQ ID NO: 1565 - DNA, 50 bp, Unknown
  Description of Unknown: Mouse/Human CpG sequence
gccaagcctggagcccgtccaggcttttcattaaggacataatatttacg

SEQ ID NO: 1566 - DNA, 50 bp, Unknown
  Description of Unknown: Mouse/Human CpG sequence
tttctccctttctaatgacatttaccggatcaaaacatgctgttaattcg

SEQ ID NO: 1567 - DNA, 50 bp, Unknown
  Description of Unknown: Mouse/Human CpG sequence
cggatattgttatattattccacccaccttaatgctgagcctttaggggt

SEQ ID NO: 1568 - DNA, 50 bp, Unknown
  Description of Unknown: Mouse/Human CpG sequence
caccgcgtggagttgcttgttcttttacataggaggtcacattctcttcg

SEQ ID NO: 1569 - DNA, 50 bp, Unknown
  Description of Unknown: Mouse/Human CpG sequence
cggatgtcattattcttataaacaacctgtcaaaagccaaacaaaagtgc

SEQ ID NO: 1570 - DNA, 50 bp, Unknown
  Description of Unknown: Mouse/Human CpG sequence
cggacgagcagttcacattccattacgaaattctacacggcttcagagcc

SEQ ID NO: 1571 - DNA, 50 bp, Unknown
  Description of Unknown: Mouse/Human CpG sequence
cggtgattgagcttgtgctcaataaatattcttgcagtatgctcaaacga

SEQ ID NO: 1572 - DNA, 50 bp, Unknown
  Description of Unknown: Mouse/Human CpG sequence
cgcagaaccctagctgtaatcactaaacttgatctcatggatgcgggtac

SEQ ID NO: 1573 - DNA, 50 bp, Unknown
  Description of Unknown: Mouse/Human CpG sequence
cggtttttgtaaactctctggatatcatcgagctgacgtcatgcagaaaa

SEQ ID NO: 1574 - DNA, 50 bp, Unknown
  Description of Unknown: Mouse/Human CpG sequence
aaacattgtttgcattctagaacatggagaaatcttttctctccattgcg

SEQ ID NO: 1575 - DNA, 50 bp, Unknown
  Description of Unknown: Mouse/Human CpG sequence
acatctttagggccgctcgggttaatatatgtcgtcagaggctcctcacg

SEQ ID NO: 1576 - DNA, 50 bp, Unknown
  Description of Unknown: Mouse/Human CpG sequence
cgactgctatgaactgaagccacagcctaaaccaggtaatataccctgac

SEQ ID NO: 1577 - DNA, 50 bp, Unknown
  Description of Unknown: Mouse/Human CpG sequence
cgcctactaaatgcacagtgccatgtgcataggcgtttatttaattacat

SEQ ID NO: 1578 - DNA, 50 bp, Unknown
  Description of Unknown: Mouse/Human CpG sequence
aattgtgcaaatgaacctttaaatccgtaaatagtgcccccacaatgccg

SEQ ID NO: 1579 - DNA, 50 bp, Unknown
  Description of Unknown: Mouse/Universal CpG sequence
cggtgacaatcatccaagtaggcctgaaacgtcttgggctttgaaatccg

SEQ ID NO: 1580 - DNA, 50 bp, Unknown
  Description of Unknown: Mouse/Universal CpG sequence
cggggagactgtttaacttcagcgtttctataggagcctgttgtagttta

SEQ ID NO: 1581 - DNA, 50 bp, Unknown
  Description of Unknown: Mouse/Universal CpG sequence
cgccccgatggaaatacactgtaagcacgacccgtttgcatccatgcata

SEQ ID NO: 1582 - DNA, 50 bp, Unknown
  Description of Unknown: Mouse/Universal CpG sequence
cggaggtcctatctgtgattggacagtctttctttgcaaagtgctggtgt

SEQ ID NO: 1583 - DNA, 50 bp, Unknown
  Description of Unknown: Mouse/Universal CpG sequence
cgtcatgtcgagacctgccagagagagacacattctcaagtgaatcctgg

SEQ ID NO: 1584 - DNA, 50 bp, Unknown
  Description of Unknown: Mouse/Universal CpG sequence
ataaaaatcttccccaacagtgtgaaggttccccagcggaaacacgttcg

SEQ ID NO: 1585 - DNA, 50 bp, Unknown
  Description of Unknown: Mouse/Universal CpG sequence
cgccccagcttcagctcgatgtctctgaggtctggcagcgggctgtcttc

SEQ ID NO: 1586 - DNA, 50 bp, Unknown
  Description of Unknown: Mouse/Universal CpG sequence
cgcagcgacacttgtgagtactgtgggaaagtcttcaagaactgtagcaa

SEQ ID NO: 1587 - DNA, 50 bp, Unknown
  Description of Unknown: Mouse/Universal CpG sequence
cgtgtgacatttttattcatggtggcgtacgcccttgtaatgatcagctc

SEQ ID NO: 1588 - DNA, 50 bp, Unknown
  Description of Unknown: Mouse/Universal CpG sequence
gtccgttgagtttcaaatctgaaaatttctgtctttcaaggtcagcatcg

SEQ ID NO: 1589 - DNA, 50 bp, Unknown
  Description of Unknown: Mouse/Universal CpG sequence
gtgtgtggagagcgtcaaccgggagatgtcgcccctggtggacaacatcg

SEQ ID NO: 1590 - DNA, 50 bp, Unknown
  Description of Unknown: Mouse/Universal CpG sequence
gcgctaattgctccagggcgctttccaagttcaaaagttcaccttttacg

SEQ ID NO: 1591 - DNA, 50 bp, Unknown
  Description of Unknown: Mouse/Universal CpG sequence
cgtctgacggcacaggtgccttggctcgatgttcctcgttactaacggca

SEQ ID NO: 1592 - DNA, 50 bp, Unknown
  Description of Unknown: Mouse/Universal CpG sequence
cggcactaagcaagcagttgccagttgtactaaaattactaccaacttaa

SEQ ID NO: 1593 - DNA, 50 bp, Unknown
  Description of Unknown: Mouse/Universal CpG sequence
caaaaatgaaaccaattaaggacaaactttgaaagcctctaattgctgcg

SEQ ID NO: 1594 - DNA, 50 bp, Unknown
  Description of Unknown: Mouse/Universal CpG sequence
gcaacatgctgaaatatggggtacattttaaatatcttcatttaaaaacg

SEQ ID NO: 1595 - DNA, 50 bp, Unknown
  Description of Unknown: Mouse/Universal CpG sequence
cactttctggtcaaaagacttggagacgaacgccgtaagttcttccatcg

SEQ ID NO: 1596 - DNA, 50 bp, Unknown
  Description of Unknown: Mouse/Universal CpG sequence
aacaaacaaaagctgcttcttgacagggagtcatttatattttagcttcg

SEQ ID NO: 1597 - DNA, 50 bp, Unknown
  Description of Unknown: Mouse/Universal CpG sequence
cgcatctgaactggaaagggagaagacagactaaatgaaatcccatccat

SEQ ID NO: 1598 - DNA, 50 bp, Unknown
  Description of Unknown: Mouse/Universal CpG sequence
ttctgtttcacttgttggcaaacttacatttcaaaacaacaacaaaaacg

SEQ ID NO: 1599 - DNA, 50 bp, Unknown
  Description of Unknown: Mouse/Universal CpG sequence
cgtgacgcttctgtcgtaatccaatcaggttacataggtcctaaacaaga

SEQ ID NO: 1600 - DNA, 50 bp, Unknown
  Description of Unknown: Mouse/Universal CpG sequence
agtgcctagtaattggtacaaaggcactttctgtttctatgcaacacacg

SEQ ID NO: 1601 - DNA, 50 bp, Unknown
  Description of Unknown: Mouse/Universal CpG sequence
tgtttaacttcagcgtttctataggagcctgttgtagtttaactcctgcg

SEQ ID NO: 1602 - DNA, 50 bp, Unknown
  Description of Unknown: Mouse/Universal CpG sequence
cgcctgtgattgacagctggagtggcagaaagccatgagatttggtagtt

SEQ ID NO: 1603 - DNA, 50 bp, Unknown
  Description of Unknown: Mouse/Universal CpG sequence
acttagcttttcccccaactcctggcggggtctgacgtcagccatgtgcg

SEQ ID NO: 1604 - DNA, 50 bp, Unknown
  Description of Unknown: Mouse/Universal CpG sequence
cgggatagtaggtgtcccaaaatgtcttaattcagagaattagtgttaac

SEQ ID NO: 1605 - DNA, 50 bp, Unknown
  Description of Unknown: Mouse/Universal CpG sequence
cgcagaattagcctgaattgcatggtaactgctgctgctttaaaattttt

SEQ ID NO: 1606 - DNA, 50 bp, Unknown
  Description of Unknown: Mouse/Universal CpG sequence
atttaatccagtctttgagctcatccacagtgacaaacccgtccttgtcg

SEQ ID NO: 1607 - DNA, 50 bp, Unknown
  Description of Unknown: Mouse/Universal CpG sequence
tgctatggggccagtttcctcctcttgtttttggcaggacggccagggcg

SEQ ID NO: 1608 - DNA, 50 bp, Unknown
  Description of Unknown: Mouse/Universal CpG sequence
cgtgcttggcgggtaattctattgggatatcctttcactctgcatggttg

SEQ ID NO: 1609 - DNA, 50 bp, Unknown
  Description of Unknown: Mouse/Universal CpG sequence
cgggtttactatttagtgtaaagagttccgatttgggtatatttaagaaa

SEQ ID NO: 1610 - DNA, 50 bp, Unknown
  Description of Unknown: Mouse/Universal CpG sequence
cgaccccagccacagcgacaacctgctgcacggcctcaacctgctgtgga

SEQ ID NO: 1611 - DNA, 50 bp, Unknown
  Description of Unknown: Mouse/Universal CpG sequence
cggaaattgccttcattggattaagcagcagccttggacgcgggttctga

SEQ ID NO: 1612 - DNA, 50 bp, Unknown
  Description of Unknown: Mouse/Universal CpG sequence
cggaacaacaaatgatagctaactacagaggcacatttgcagtagtcaca

SEQ ID NO: 1613 - DNA, 50 bp, Unknown
  Description of Unknown: Mouse/Universal CpG sequence
atcagctattagtgcctaatcatatggtctatcgatcatgagattaatcg

SEQ ID NO: 1614 - DNA, 50 bp, Unknown
  Description of Unknown: Mouse/Universal CpG sequence
cggagaagccgactgccccacagacctggaaatggccgcccccaaaggcc

SEQ ID NO: 1615 - DNA, 50 bp, Unknown
  Description of Unknown: Mouse/Universal CpG sequence
aagggtttctaatcctggaaggctgtctgacatcaccccgtttcttgtcg

SEQ ID NO: 1616 - DNA, 50 bp, Unknown
  Description of Unknown: Mouse/Universal CpG sequence
gtaaaactgaaagtatcccacgccagagtgaagcccgctttttgacagcg

SEQ ID NO: 1617 - DNA, 50 bp, Unknown
  Description of Unknown: Mouse/Universal CpG sequence
cgctccccttacaacacctcagtgtatggttggtataagggtttgtatca

SEQ ID NO: 1618 - DNA, 50 bp, Unknown
  Description of Unknown: Mouse/Universal CpG sequence
atggtgagaataaaccaccacaggccattgtgaaaccccaaatcctgacg

SEQ ID NO: 1619 - DNA, 50 bp, Unknown
  Description of Unknown: Mouse/Universal CpG sequence
cgcagacctacatgaacggctcgcccacctacagcatgtcctactcgcag

SEQ ID NO: 1620 - DNA, 50 bp, Unknown
  Description of Unknown: Mouse/Universal CpG sequence
cgcgtagcagccatctggcatccttatcccgtccagagccatggctcctt

SEQ ID NO: 1621 - DNA, 50 bp, Unknown
  Description of Unknown: Mouse/Universal CpG sequence
acgtgagacttcttcttgaacatcttgccacaaatgctgcatttatggcg

SEQ ID NO: 1622 - DNA, 50 bp, Unknown
  Description of Unknown: Mouse/Universal CpG sequence
ctctcagacaagacttgaacctatgaccttcactgtgtacacaataggcg

SEQ ID NO: 1623 - DNA, 50 bp, Unknown
  Description of Unknown: Mouse/Universal CpG sequence
aattgtttggcaaattctttggcttccagcgtgtcccccaggcaggaacg

SEQ ID NO: 1624 - DNA, 50 bp, Unknown
  Description of Unknown: Mouse/Universal CpG sequence
cgggggccagcgctgcggctggattcccatccagtaccccatcatttccg

SEQ ID NO: 1625 - DNA, 50 bp, Unknown
  Description of Unknown: Mouse/Universal CpG sequence
atttagactgactgtttgcactgcagactgcggccactgggttcccggcg

SEQ ID NO: 1626 - DNA, 50 bp, Unknown
  Description of Unknown: Mouse/Universal CpG sequence
ggttccagaggattgggcccacaggggtcatgctcagtacaagacagacg

SEQ ID NO: 1627 - DNA, 50 bp, Unknown
  Description of Unknown: Mouse/Universal CpG sequence
tgaccctctgctgctgggccatcaaagtttggtgcatcttctgccaatcg

SEQ ID NO: 1628 - DNA, 50 bp, Unknown
  Description of Unknown: Mouse/Universal CpG sequence
cgagacgaaaaggaaaagcaaaccagaatcttatttatattgttataaaa

SEQ ID NO: 1629 - DNA, 50 bp, Mus musculus
cggacagtgattaatgatagcagagcagaggggttaacacacttcactga

SEQ ID NO: 1630 - DNA, 50 bp, Mus musculus
cggaggatttcccaagcagttgttgcacaggtaacaggtaagagctgaag

SEQ ID NO: 1631 - DNA, 50 bp, Mus musculus
ttccctctccaacgggagcggaaaatgtgatttgctgtgcattccaggcg

SEQ ID NO: 1632 - DNA, 50 bp, Mus musculus
cagagactgaacccttgatataataatctacaaagaatggtgtgtgatcg

SEQ ID NO: 1633 - DNA, 50 bp, Mus musculus
ctcctgtccatgtaaacattcctctgactttcttccctaaaatataaacg

SEQ ID NO: 1634 - DNA, 50 bp, Mus musculus
cggtgagaacaccgagtgacgatctgttgcttcccctgaggtggctacaa

SEQ ID NO: 1635 - DNA, 50 bp, Mus musculus
cgcggatggatgctgcgggaaggggctgccatttgctgcccctgccagcg

SEQ ID NO: 1636 - DNA, 50 bp, Mus musculus
cgggcacagtactcatctaacacaaagacttggccagggctaaaccatcc

SEQ ID NO: 1637 - DNA, 50 bp, Mus musculus
agcagatccaccacggggagcccaccgactttattaacctgcacaatgcg

SEQ ID NO: 1638 - DNA, 50 bp, Mus musculus
tcattttgtgtgtaaatgagcgtggcattctgctcacttctctctgctcg

SEQ ID NO: 1639 - DNA, 50 bp, Mus musculus
cgcagctgccttgaggttgtttatttcccagcgttttctcaagactcctg

SEQ ID NO: 1640 - DNA, 50 bp, Mus musculus
gagaggaaaatccctgcatttccaaccacctgatgcaaccaatgacaacg

SEQ ID NO: 1641 - DNA, 50 bp, Mus musculus
cctagcttcaccttattctttaaagggcagaaaatttgagacggtgatcg

SEQ ID NO: 1642 - DNA, 50 bp, Mus musculus
cgcccctaaccactgggtcatcatttattcacaggcctgaagtcccttaa

SEQ ID NO: 1643 - DNA, 50 bp, Mus musculus
acaaaaaggaatttactgcaattccttgcggattttgcacatacagctcg

SEQ ID NO: 1644 - DNA, 50 bp, Mus musculus
ccttcctacctgaggtgaacaggactatggccttgaggcagctgtactcg

SEQ ID NO: 1645 - DNA, 50 bp, Mus musculus
cgctatctcatggacacaggtacggtgcccaattacactgtaaacagttt

SEQ ID NO: 1646 - DNA, 50 bp, Mus musculus
cgctccctgccaaattgattcaaattggcttggatatgaacatatgatta

SEQ ID NO: 1647 - DNA, 50 bp, Mus musculus
cggtggtcatgacctacagtatcacctgccccatcatcgtgcccttcggt

SEQ ID NO: 1648 - DNA, 50 bp, Mus musculus
aggacctggaaaggaatgacggctctcaggagcgaccctacttcatgtcg

SEQ ID NO: 1649 - DNA, 50 bp, Mus musculus
tgcctatagagccaccagtgacccgtcaaaaagagtagcatgggaattcg

SEQ ID NO: 1650 - DNA, 50 bp, Mus musculus
acaatgctgctgcgtcacccacatgcagctcccagaaatgctttgcaacg

SEQ ID NO: 1651 - DNA, 50 bp, Mus musculus
cgacctttggggcctggtggttgttaatgcatgagtgactgcctgcattg

SEQ ID NO: 1652 - DNA, 50 bp, Mus musculus
cgcccggctcagctgcactatttaggagatgaggtttgtcaatttctatt

SEQ ID NO: 1653 - DNA, 50 bp, Mus musculus
cgctttgtggccacgctggatattagtagatgaggatcattctgcttcaa

SEQ ID NO: 1654 - DNA, 50 bp, Mus musculus
gaaaagtctgttgactgggcttcttgtaacacaatgtggcccgctgcacg

SEQ ID NO: 1655 - DNA, 50 bp, Mus musculus
cgcttcgcgcacccacccctgccgaggagcctacttgctgcagcccaatg

SEQ ID NO: 1656 - DNA, 50 bp, Mus musculus
cgcctcccagacctctggggccatgaatcatttatgaggcaaaaatgaaa

SEQ ID NO: 1657 - DNA, 50 bp, Mus musculus
gaagtagatagctctatgcatcattaatgaaattttttaacacttaaacg

SEQ ID NO: 1658 - DNA, 50 bp, Mus musculus
cgtcagacaagtgcactcaacagaacggcccttcaaatgtgaggtaggaa

SEQ ID NO: 1659 - DNA, 50 bp, Mus musculus
ccttaaggagtaccaggccaaggtgacgcccacggggccctgcagctacg

SEQ ID NO: 1660 - DNA, 50 bp, Mus musculus
ttatagtcagtgggttgtttgcgaccttcttagcatacgcatccaattcg

SEQ ID NO: 1661 - DNA, 50 bp, Mus musculus
caattaccataaaaatatctttctttaaaatcctgacccaaaacacaacg

SEQ ID NO: 1662 - DNA, 50 bp, Mus musculus
cgcattgatttaacacatcttgttttcaatcatgcttggattttctgagc

SEQ ID NO: 1663 - DNA, 50 bp, Mus musculus
gctgcattaaattgtaaaatcgatttattgaccggcaggtgcgagcagcg

SEQ ID NO: 1664 - DNA, 50 bp, Mus musculus
cgaggaggctgaacactgcatgaagagaggaccgagccaatgagagaaca

SEQ ID NO: 1665 - DNA, 50 bp, Mus musculus
tgcgtcagctctgccttataaatggagtgcattctatcaaaaccaggacg

SEQ ID NO: 1666 - DNA, 50 bp, Mus musculus
cgaagataattgtttcatccactttgtcaaagctgaaatgaaaagagggc

SEQ ID NO: 1667 - DNA, 50 bp, Mus musculus
atgccacctttggttattaacatgtctctctctacttttatgatttttcg

SEQ ID NO: 1668 - DNA, 50 bp, Mus musculus
gctctctctggggacttccatgcaggacatccccggattaggtgacgacg

SEQ ID NO: 1669 - DNA, 50 bp, Mus musculus
aggacccttgatcttcggtgggcagtaggaatcaaggaccctcaaattcg

SEQ ID NO: 1670 - DNA, 50 bp, Mus musculus
taattagaaatgcttttcatatcttctctgtgcaagggcttaatctgacg

SEQ ID NO: 1671 - DNA, 50 bp, Mus musculus
cagcggcacacagagtcccagccaataactgcacgaagaatgagctagcg

SEQ ID NO: 1672 - DNA, 50 bp, Mus musculus
taattgcaatgaggccctctaggccgtgaattaatgtgtcataactcacg

SEQ ID NO: 1673 - DNA, 50 bp, Mus musculus
ggggctgttgagactttctggcatggtggtcatggtcatctcttctcgcg

SEQ ID NO: 1674 - DNA, 50 bp, Mus musculus
tctagcccagaagatgtccaggctttggtgagcgggaagcttgcacttcg

SEQ ID NO: 1675 - DNA, 50 bp, Mus musculus
cggctgtctctagtgtgttattgttagtgttacattacaaatcccgtttc

SEQ ID NO: 1676 - DNA, 50 bp, Mus musculus
cgcctgccaggcagagacagatggagagctgacactccggattgcacttg

SEQ ID NO: 1677 - DNA, 50 bp, Mus musculus
gaagagcagcagcggcagcacgaaggtgcagagcgcactggccagcagcg

SEQ ID NO: 1678 - DNA, 50 bp, Mus musculus
cgggttttaggcaagccaggtgcattctggatgtagtctggtgtggcaat

SEQ ID NO: 1679 - DNA, 50 bp, Mus musculus
cggattagcagtatgaaagaaagacacacaataagctggaattgttttac

SEQ ID NO: 1680 - DNA, 50 bp, Mus musculus
ccagacgcttactatgcagtgtaagctcagttggtttactaatcaccccg

SEQ ID NO: 1681 - DNA, 50 bp, Mus musculus
ggtttctgaacataataaaatctttggcttgtagcggcggttcagtctcg

SEQ ID NO: 1682 - DNA, 50 bp, Mus musculus
atctacttcgcctcatttggttactaattggtttcttgttttataaatcg

SEQ ID NO: 1683 - DNA, 50 bp, Mus musculus
cacagcctctcatgtttcgttccctcttttcttcttctttttaactagcg

SEQ ID NO: 1684 - DNA, 50 bp, Mus musculus
ttcatacctgatggagcctgcatctgaggatgattcattgtgctcacacg

SEQ ID NO: 1685 - DNA, 50 bp, Mus musculus
cgccatggagaaatcttggtaatgacccattccccgtaagcatcccagga

SEQ ID NO: 1686 - DNA, 50 bp, Mus musculus
cgcgtacatcacagtaagttgtctattgattttcctgaatgaaaatggtc

SEQ ID NO: 1687 - DNA, 50 bp, Mus musculus
cgctgtaataagcagttattatgtatgtgtaaaaataatgagaggccgtg

SEQ ID NO: 1688 - DNA, 50 bp, Mus musculus
cgggacccctccaaggacagcagcaccaccttgtggagtacatggaacgc

SEQ ID NO: 1689 - DNA, 50 bp, Mus musculus
cgcaatccaatccattcggagttgagcctaggataggaggggaaagtcta

SEQ ID NO: 1690 - DNA, 50 bp, Mus musculus
ttggtgtgcagggagccgctgaactgcatgtactgcaccaggtaggagcg

SEQ ID NO: 1691 - DNA, 50 bp, Mus musculus
cgaaggtgctaaggcccagaagctcaaaggagatacacatgtggccatgg

SEQ ID NO: 1692 - DNA, 50 bp, Mus musculus
ttctctgcaggactgtgtgttcagcaaggaagcaggacgcatgtgctacg

SEQ ID NO: 1693 - DNA, 50 bp, Mus musculus
cgtcagggtatctgagtttcacagaacagacggggtgagagtttttgtgc

SEQ ID NO: 1694 - DNA, 50 bp, Mus musculus
cgtcacttgaacatgtgccgtccagagctggccctgttctagccgtcaca

SEQ ID NO: 1695 - DNA, 50 bp, Mus musculus
cctccaggagccagaatccaatttcagaaaccacaaaatcaacataaacg

SEQ ID NO: 1696 - DNA, 50 bp, Mus musculus
tgcatacctgcaacacttatgctaccgcaatgacaaggtgaagactgacg

SEQ ID NO: 1697 - DNA, 50 bp, Mus musculus
ttttttcccacaggattagatctgggcaggattcatattcataacccacg

SEQ ID NO: 1698 - DNA, 50 bp, Mus musculus
cgggcgccagcttccacagcagcaactgttgctatggagaccaggctcca

SEQ ID NO: 1699 - DNA, 50 bp, Mus musculus
cgcccccgtccacggccacggaaggaagcccgcgccccaccagccccatc

SEQ ID NO: 1700 - DNA, 50 bp, Mus musculus
aacacgtggactctataatcaacaagcggctctcaaagtcctctgccacg

SEQ ID NO: 1701 - DNA, 50 bp, Mus musculus
cgcgtcaggtggtggcgatgacttaattcctagcccaagaagaatataat

SEQ ID NO: 1702 - DNA, 50 bp, Mus musculus
cgcacacctgcagcagggacttgacactgggctggaagaccatgttggtg

SEQ ID NO: 1703 - DNA, 50 bp, Mus musculus
cggctcccgttctgcagcagctcctcaaactggatggtgcagttggccac

SEQ ID NO: 1704 - DNA, 50 bp, Mus musculus
aaacttctattagtaatggagacctcgccggagaccttccgcggagagcg

SEQ ID NO: 1705 - DNA, 50 bp, Mus musculus
cgcagagcgaaagcgtttacagacctgaaaattgttgttgaaggcagaga

SEQ ID NO: 1706 - DNA, 50 bp, Mus musculus
cgatcatttcctcacttgtttaaatagtgcagcttgtgttggcagtgctc

SEQ ID NO: 1707 - DNA, 50 bp, Mus musculus
cggcgagggcctcaccgagggcatggacaagctctatgagatgatcctga

SEQ ID NO: 1708 - DNA, 50 bp, Mus musculus
gtgcagcaaacaaaaagtgtgtgtctgcgtgccagtcagtcactgcatcg

SEQ ID NO: 1709 - DNA, 50 bp, Mus musculus
cgggtttgtctttaacctccaaacagggaactttaattaaagagacagtg

SEQ ID NO: 1710 - DNA, 50 bp, Mus musculus
taaacaaaacagaaggttgtaactgtcataatttgcattgcactttcacg

SEQ ID NO: 1711 - DNA, 50 bp, Mus musculus
cggaaaccgccccccggctgctccgattcccctggagtgtgaagctgacc

SEQ ID NO: 1712 - DNA, 50 bp, Mus musculus
aagagcacagcagtcctacaagtccttggtgcagatccacgaaaaaaacg

SEQ ID NO: 1713 - DNA, 50 bp, Mus musculus
cgggatctgtctttcacttagacttaattaagaaacttgctggctttgtc

SEQ ID NO: 1714 - DNA, 50 bp, Mus musculus
ggggcagccgtgggcttagtctttgccttcctcctggccctgaccacacg

SEQ ID NO: 1715 - DNA, 50 bp, Mus musculus
ttctgtatgtttttcctttaaaaccaagagctgggcaggcatcccattcg

SEQ ID NO: 1716 - DNA, 50 bp, Mus musculus
cgccagtctgatgccaggactgaataaagtgtatttgccccgaccttgcc

SEQ ID NO: 1717 - DNA, 50 bp, Mus musculus
ctgatctgtcagacattgattatcatgagcagctgttgttgggtagaacg

SEQ ID NO: 1718 - DNA, 50 bp, Mus musculus
cgcccttagataaataattacactcttaagctgtgtcgagtgctgataca

SEQ ID NO: 1719 - DNA, 50 bp, Mus musculus
cgggggccagctgtcccagtgggggtcatgtagccgatatttatcttgca

SEQ ID NO: 1720 - DNA, 50 bp, Mus musculus
aatctgtagattcccacagcgcgtttatatcctcactagagtgagctccg

SEQ ID NO: 1721 - DNA, 50 bp, Mus musculus
cgctaaagaccccctgacttccagcaagtccacattaaacatgtgacatg

SEQ ID NO: 1722 - DNA, 50 bp, Mus musculus
aagagacttgactttaagagactcctgtactgacaactccatgcagttcg

SEQ ID NO: 1723 - DNA, 50 bp, Mus musculus
tgtgcatttaatgaaaccgtctggctgtgataccatcagctccaagctcg

SEQ ID NO: 1724 - DNA, 50 bp, Mus musculus
cgttcaaggctaacacctgagctttgtgtaatgtaaataagaccttgtgt

SEQ ID NO: 1725 - DNA, 50 bp, Mus musculus
catgaggaatagcatcttccaactcatgatacacacccttgacccactcg

SEQ ID NO: 1726 - DNA, 50 bp, Mus musculus
tttaactagtgattacagaccggcaaccttctagccctgaatgtcaaacg

SEQ ID NO: 1727 - DNA, 50 bp, Mus musculus
atggtctgctgcccacctaattttgccttattgtcagtcactacttaccg

SEQ ID NO: 1728 - DNA, 50 bp, Mus musculus
ccattatctagtttctcctgcctccaggcagggccacatcattgattacg

SEQ ID NO: 1729 - DNA, 50 bp, Mus musculus
cgggtcacagattgaatcaattgtccaatcttgtgaaagtcatatccttg

SEQ ID NO: 1730 - DNA, 50 bp, Mus musculus
taattatccgtctcatttgagaagagcagcatttgaggcagcagcgttcg

SEQ ID NO: 1731 - DNA, 50 bp, Mus musculus
ttcagggcttaattactcctccttgatccatgggactagacacgacaccg

SEQ ID NO: 1732 - DNA, 50 bp, Mus musculus
cggggaaatccaatacgctgaaaggttaatgcaatcaattagggtgacaa

SEQ ID NO: 1733 - DNA, 50 bp, Mus musculus
tatacatgttcaaataattgctcatcctaatgtgcagtgatctgtattcg

SEQ ID NO: 1734 - DNA, 50 bp, Mus musculus
tcactttcacaacccagaacaaaaatctcgctagatatggcctcagaccg

SEQ ID NO: 1735 - DNA, 50 bp, Mus musculus
cggcccttcagtggctttgacccagatgacatggatgtggatgaagatga

SEQ ID NO: 1736 - DNA, 50 bp, Mus musculus
tagctgaatgcctctcacaaccacgggcggaagtctggaagaaatcaccg

SEQ ID NO: 1737 - DNA, 50 bp, Mus musculus
aggcatcgataggcggtgtaggcagccttcattcagtccatcagggcccg

SEQ ID NO: 1738 - DNA, 50 bp, Mus musculus
cgcctccagttgaggaggctgggagccgccatcttcccaacccccgcccc

SEQ ID NO: 1739 - DNA, 50 bp, Mus musculus
cgggcctggagctgcccgcagcacaacgcctaccgcctctaccactgcga

SEQ ID NO: 1740 - DNA, 50 bp, Mus musculus
cgagccaattagacttgtcagactccaatccagttgagagtgacccctga

SEQ ID NO: 1741 - DNA, 50 bp, Mus musculus
cgatgcatatgtttagaataatgtttcatttagctgactgcgagtaatgc

SEQ ID NO: 1742 - DNA, 50 bp, Mus musculus
taaacaggactccgtaaacatactgacgaactggcctatagagcagagcg

SEQ ID NO: 1743 - DNA, 50 bp, Mus musculus
cggagacgtgatatgtcatatgattagcatctttcatatttacaagagtg

SEQ ID NO: 1744 - DNA, 50 bp, Mus musculus
cggcttccctagaagaacgggcggagagagttttttatggccccataaaa

SEQ ID NO: 1745 - DNA, 50 bp, Mus musculus
gggctccctgttctttcgcaccaggctgacaaatgtgtcaatctctgccg

SEQ ID NO: 1746 - DNA, 50 bp, Mus musculus
cgcataaatccagatgacatagatttagaaaatgagccctggtataaatt

SEQ ID NO: 1747 - DNA, 50 bp, Mus musculus
cgcaccgtttatcttgcttggattcaccttcaagagatttccggacccat

SEQ ID NO: 1748 - DNA, 50 bp, Mus musculus
cgccaagctctgtcccccagggccgccaggttgatgctgataccaaggct

SEQ ID NO: 1749 - DNA, 50 bp, Mus musculus
tgatttctctttcttctttggaaatttcattgagatgtctctgtacttcg

SEQ ID NO: 1750 - DNA, 50 bp, Mus musculus
aaacaaggttggtatgggcccaacacaaacgcccatatcgatgagtcacg

SEQ ID NO: 1751 - DNA, 50 bp, Mus musculus
cgtcaaccaccgcaaacacaacattccgcacttctggcccaagctgctga

SEQ ID NO: 1752 - DNA, 50 bp, Mus musculus
acatctggaaccagttgcaatacatcactgtcaaaactgctttctatacg

SEQ ID NO: 1753 - DNA, 50 bp, Mus musculus
cgccgcccaggtgttcccctgcaagtactgcccggccaccttctacagct

SEQ ID NO: 1754 - DNA, 50 bp, Mus musculus
cggagggtcgccaggaaagtggacattaccgctttaattaacttcgagat

SEQ ID NO: 1755 - DNA, 50 bp, Mus musculus
cggagcaggaagactgttacttacgtcgcctgagggaaacccaccgtcca

SEQ ID NO: 1756 - DNA, 50 bp, Mus musculus
gattattaaaaagttcatttcctggcgaatcgggtgacgtcaggggctcg

SEQ ID NO: 1757 - DNA, 50 bp, Mus musculus
caggcctttcaaacaccttttccctgctctattcaaacttgaattctgcg

SEQ ID NO: 1758 - DNA, 50 bp, Mus musculus
cgcttggttaattcagagtaacagatctgcccccaagtgaattggaggcc

SEQ ID NO: 1759 - DNA, 50 bp, Mus musculus
cgctgtgtagggagaaaagatgttgcagtaggtactggcgatctacagga

SEQ ID NO: 1760 - DNA, 50 bp, Mus musculus
aaaatggatcaaccctggtgtgtagctagcaagcaataactgactactcg

SEQ ID NO: 1761 - DNA, 50 bp, Mus musculus
cggccaaccttactgcacccttcagcgtccggagctgggcaaccatgtcc

SEQ ID NO: 1762 - DNA, 50 bp, Mus musculus
tttgtaaactcctaggacgagtgccttgcttgaaccaaagtgttaaaccg

SEQ ID NO: 1763 - DNA, 50 bp, Mus musculus
cggtaacagaatatgatggagggcacactgtttccttaactgcttctcaa

SEQ ID NO: 1764 - DNA, 50 bp, Mus musculus
agcttgccacagtatgaagtccagtttgggctatattcccttccctctcg

SEQ ID NO: 1765 - DNA, 50 bp, Mus musculus
aaacttaagagcgacagaacaaggaacaggcagagactgcaaagccctcg

SEQ ID NO: 1766 - DNA, 50 bp, Mus musculus
cgtcagaatcctcactgctgctgggaaggcgacctcgtttcatgatctcc

SEQ ID NO: 1767 - DNA, 50 bp, Mus musculus
ctgcctttggtcacgtcgaagactttcccattgaccgcgagcaggatgcg

SEQ ID NO: 1768 - DNA, 50 bp, Mus musculus
cgtccagtaattaattttcctgctgccggggggtggtggttttgacacat

SEQ ID NO: 1769 - DNA, 50 bp, Mus musculus
ttgcatggggaccccctgctcactcaggactttcagaggagacgcctgcg

SEQ ID NO: 1770 - DNA, 50 bp, Mus musculus
gtgcggggagaactggtgcttgaggctgcagaggaagctccagagctccg

SEQ ID NO: 1771 - DNA, 50 bp, Mus musculus
ctttggggggcagccctgtcagattggccaggtggaagatgtcggcatcg

SEQ ID NO: 1772 - DNA, 50 bp, Mus musculus
cgtgacatgaactttgtgtgtaagagtgggttcattgaattaaaaaaaag

SEQ ID NO: 1773 - DNA, 50 bp, Mus musculus
tattacagctgacaagagggtgatgatattagcccatcatcattcagacg

SEQ ID NO: 1774 - DNA, 50 bp, Mus musculus
ttgtacaagatccgcagacgtgtaaatgttcctgcaaaaacacagactcg

SEQ ID NO: 1775 - DNA, 50 bp, Mus musculus
cgggcagtagtttgtcaccaattccaaatggccaatcgttaatactaatg

SEQ ID NO: 1776 - DNA, 50 bp, Mus musculus; identical to SEQ ID NO: 1242

SEQ ID NO: 1777 - DNA, 50 bp, Mus musculus
gaccatcatctcaggatgtctctttctggccgccgatatcttcgccatcg

SEQ ID NO: 1778 - DNA, 50 bp, Mus musculus
cgcccttcagtggctgcatgttctccagctgctccaggaggggcccgatg

SEQ ID NO: 1779 - DNA, 50 bp, Mus musculus
ccggaccatgtgctcggcgtgagacaaaagcaacaacaaaggaagtggcg

SEQ ID NO: 1780 - DNA, 50 bp, Mus musculus
tgaacagttggattcttttatttcttacaagtgctggattcgccttatcg

SEQ ID NO: 1781 - DNA, 50 bp, Mus musculus
cggcagttttcgtcagttaattaggtttaatttacataattagtacagta

SEQ ID NO: 1782 - DNA, 50 bp, Mus musculus
cggcttaccaggaaacgatgatgtggcaacaatgccatctggaggcaaag

SEQ ID NO: 1783 - DNA, 50 bp, Mus musculus
cctgaagcggaaactgacaaattctgtttaacaaagacatttgtccctcg

SEQ ID NO: 1784 - DNA, 50 bp, Mus musculus
cgccttcccagcagcagtgaggattctgacgacaatggcagtaagtcctg

SEQ ID NO: 1785 - DNA, 50 bp, Mus musculus
cggccgctgcccaggcggaagcccttggagcgcacccagaactggaactt

SEQ ID NO: 1786 - DNA, 50 bp, Mus musculus
ctccagcatgaccaggcaaatctgcttgacacactcggtgacagactgcg

SEQ ID NO: 1787 - DNA, 50 bp, Mus musculus
cagattttcttgagtgagcaaatctgcctggcttttacacctagaaatcg

SEQ ID NO: 1788 - DNA, 50 bp, Mus musculus
cataacggatgcatttgcagatttggaaaattaaagccatctatatggcg

SEQ ID NO: 1789 - DNA, 50 bp, Mus musculus
gagcatcctgtcttctgcttggcctcccaagtgatggatttaaccattcg

SEQ ID NO: 1790 - DNA, 50 bp, Mus musculus
cgtcaaatggctcagaaggcaaagtttggctgcaagggctatggccgtgg

SEQ ID NO: 1791 - DNA, 50 bp, Mus musculus
ctcacctgggggcagctggaagttctggatgttggtcgggttctgaggcg

SEQ ID NO: 1792 - DNA, 50 bp, Mus musculus
gcaatgtacttcagaaatagggtcctgttcattctttgctttacaaatcg

SEQ ID NO: 1793 - DNA, 50 bp, Mus musculus
gcattatgttttgtctgtaacagctgctgttttatctttatttcctctcg

SEQ ID NO: 1794 - DNA, 50 bp, Mus musculus
cgggcctccaagatgatgtcttgaaatgtacagccgttggagggcaagga

SEQ ID NO: 1795 - DNA, 50 bp, Mus musculus
cgcggctcctttaagagcccggctttgcctcccggtagctgaaggtcatt

SEQ ID NO: 1796 - DNA, 50 bp, Mus musculus
gtgttctccagctgttcccgagtaaagaaccagcgagaagaagctccacg

SEQ ID NO: 1797 - DNA, 50 bp, Mus musculus
ttgtcgagcctgaatatgctgctgtcagactcgcttaatgaaaagtaacg

SEQ ID NO: 1798 - DNA, 50 bp, Mus musculus
gtttcctcaggagctggcgcagaaaattaagggctaccaggagcagatcg

SEQ ID NO: 1799 - DNA, 50 bp, Mus musculus
ctcatgcatgctgacctggaaatcctcctttgccttagctgcgataatcg

SEQ ID NO: 1800 - DNA, 50 bp, Mus musculus
aacaggcgggaggggtaacaaaccagctctcgtccatcaaggagggcgcg

SEQ ID NO: 1801 - DNA, 50 bp, Mus musculus
cgatccgtcagtaatggtgcatgtcgggaccctggcgcctctgacaagtc

SEQ ID NO: 1802 - DNA, 50 bp, Mus musculus
ttggaggctgctcatgccccccttgaagtcgttttaaaaataaaacctcg

SEQ ID NO: 1803 - DNA, 50 bp, Mus musculus
cgcaaacattgcggtttggtttgatttagtctaactcttgtgtaataact

SEQ ID NO: 1804 - DNA, 50 bp, Mus musculus
ataagagtctttccacttcaatcttcgaaggtggctacaaagcacatgcg

SEQ ID NO: 1805 - DNA, 50 bp, Mus musculus
acagctcgaccgtcatctgtaaaaaatgtctcagtgagagataatcatcg

SEQ ID NO: 1806 - DNA, 50 bp, Mus musculus
gatgctcctttcccggtaactcgccctctcaggcaaacctgaagatagcg

SEQ ID NO: 1807 - DNA, 50 bp, Mus musculus
cggagctccagctgttgtgggaagagaggaccagccggcaacttttatcc

SEQ ID NO: 1808 - DNA, 50 bp, Mus musculus
gtgccttgtcttcttattccatccatgaatagaaacgctatcagtcaacg

SEQ ID NO: 1809 - DNA, 50 bp, Mus musculus
cgaccaggtgtttccattgtctctggtaatacagtgttggccgccaaggt

SEQ ID NO: 1810 - DNA, 50 bp, Mus musculus
tggatcgccaaatggtcagtgagctgtaaaatgtgcaaccctcctccccg

SEQ ID NO: 1811 - DNA, 50 bp, Mus musculus
cggcccctttaagcagatacaaaggctcggcttgttttgttacagttcat

SEQ ID NO: 1812 - DNA, 50 bp, Mus musculus
cgtaacatctgcttaatcgtacggatcaaaatatggagacacaaaacata

SEQ ID NO: 1813 - DNA, 50 bp, Mus musculus
cgggccgcagttaaggtgacgagatgcagcaattctttatgaacatttca

SEQ ID NO: 1814 - DNA, 50 bp, Mus musculus
tgatttaatgtctatacaattaaggcacgcggtgaatgccaagagaggcg

SEQ ID NO: 1815 - DNA, 50 bp, Mus musculus
cctcagacaggtctaaaggttaatagagcaatcacagggccctattaccg

SEQ ID NO: 1816 - DNA, 50 bp, Mus musculus
tgggattaattaccacgttctggtccctcagactggagtattacttatcg

SEQ ID NO: 1817 - DNA, 50 bp, Mus musculus
ccaaagagctccacgggacatccattgtgcccaagctgcaggccatcacg

SEQ ID NO: 1818 - DNA, 50 bp, Mus musculus
cggagcagaaaattactaatagaagagagataatgaataggccggccagg

SEQ ID NO: 1819 - DNA, 50 bp, Mus musculus
ctgtggcaggggtctcggaaaccatgggttattgcagtggcaggtgcacg

SEQ ID NO: 1820 - DNA, 50 bp, Mus musculus
gctcagaggctccagcaggggccagagcttcaaagtcagagaaaatcacg

SEQ ID NO: 1821 - DNA, 50 bp, Mus musculus
aaggagacgtagggggctccccagggccagcggggctggtaactgacacg

SEQ ID NO: 1822 - DNA, 50 bp, Mus musculus
acatgcatcagctgttgggcttttgttacgggtattgtagaactaatccg

SEQ ID NO: 1823 - DNA, 50 bp, Mus musculus
aagagtgagccaaggcagtaaaatgtagctgaatgcctctcacaaccacg

SEQ ID NO: 1824 - DNA, 50 bp, Mus musculus
aggtgtgactgccatgccttgggctccaccaatgggcagtgtgacatccg

SEQ ID NO: 1825 - DNA, 50 bp, Mus musculus
cgcgctccctgcaaagcagctctcattatcccggaagttgtgctgacaca

SEQ ID NO: 1826 - DNA, 50 bp, Mus musculus
cgtagtaaatatttgatactgttaaatatttcaccagttttatggggcct

SEQ ID NO: 1827 - DNA, 50 bp, Mus musculus
cggctccggcgcgagttgcctctccgcttcacgctcgatttccaggcatt

SEQ ID NO: 1828 - DNA, 50 bp, Mus musculus
taatgaccttgaatccccagctgttgggaggtgtcctgaactcggcatcg

SEQ ID NO: 1829 - DNA, 50 bp, Mus musculus
agcagcgggagcagattcgggcaattacaatcaagtcagggcacacgccg

SEQ ID NO: 1830 - DNA, 50 bp, Mus musculus
gctaatggccatgcattattcaccagcctaattgctcagccccatgcgcg

SEQ ID NO: 1831 - DNA, 50 bp, Mus musculus
cgtcaggaaaggcacttcttagtaccaacctgtagaaaaaagagataggt

SEQ ID NO: 1832 - DNA, 50 bp, Mus musculus
tccccagtgcttgtcatttcctgacatgcctgacaggatggggacagccg

SEQ ID NO: 1833 - DNA, 50 bp, Mus musculus
cgattgctggggccacagtgttggtactcttattttgctgtgccaccttt

SEQ ID NO: 1834 - DNA, 50 bp, Mus musculus
cgctccttcagctggtgatccacctcaggaccaaaggcaaaattattcac

SEQ ID NO: 1835 - DNA, 50 bp, Mus musculus
cgtgactgtttggaacctacaccatagtaaatttgctatttttagtatag

SEQ ID NO: 1836 - DNA, 50 bp, Mus musculus
cggaccacaccaatccgtctgctggttgaggccaaagcgagcacggcatt

SEQ ID NO: 1837 - DNA, 50 bp, Mus musculus
tgaatcggaggtactaaaaatacccccgcgacagcctgaggaagctgtcg

SEQ ID NO: 1838 - DNA, 50 bp, Mus musculus
ggtcacaatgcttacactgtatgcagcaaacacccttacaagtctatccg

SEQ ID NO: 1839 - DNA, 50 bp, Mus musculus
tcaccgagctggggccaacccagaagttctcctgctggatgtacttcacg

SEQ ID NO: 1840 - DNA, 50 bp, Mus musculus
ccaccacctgcaaataccccaggaaaagcagttggaaacaataaaacacg

SEQ ID NO: 1841 - DNA, 50 bp, Mus musculus
cggcaagactaattgccatgcgcttccgctttgaaactggcagcagacag

SEQ ID NO: 1842 - DNA, 50 bp, Mus musculus
gttccatgccccagcggactcccattagggtctgcatctccttggtaacg

SEQ ID NO: 1843 - DNA, 50 bp, Mus musculus
ctcatgtttagtaattcagacctttaataacagccactcacagcccaacg

SEQ ID NO: 1844 - DNA, 50 bp, Mus musculus
cgggcccgagcccctgtcccacttcgaagtggaggtctgccagctgcccc

SEQ ID NO: 1845 - DNA, 50 bp, Mus musculus
cttagcccattgggccaaagcactgtcttggaggtgacaaagatgtctcg

SEQ ID NO: 1846 - DNA, 50 bp, Mus musculus
cggagactcaacatcctggaggaccccagactcaggccctgcgagtacaa

SEQ ID NO: 1847 - DNA, 50 bp, Mus musculus
caaagggcaatattcacagtttatctcagggtgatggatctgaatggacg

SEQ ID NO: 1848 - DNA, 50 bp, Mus musculus
ctacctttaagaatatttcctgtttcttcaacccaacttgcacacctccg

SEQ ID NO: 1849 - DNA, 50 bp, Mus musculus
agggacaggatatcactcttctccttctctggctgggcgagcagtttgcg

SEQ ID NO: 1850 - DNA, 50 bp, Mus musculus
cgggagaataaggccatgccctgccaggtgtgcaagaaagttctagagcc

SEQ ID NO: 1851 - DNA, 50 bp, Mus musculus
cggatgaataatatatgcatttatgcagaggtaattgccttagccaggtt

SEQ ID NO: 1852 - DNA, 50 bp, Mus musculus
cggcaaagtggccagcaacagagtcctgatccaaatggagaaagggaacc

SEQ ID NO: 1853 - DNA, 50 bp, Mus musculus
acctcgaccttgaagatggtgagtagccagccaaagtacgatctaatacg

SEQ ID NO: 1854 - DNA, 50 bp, Mus musculus
cgccgtacttgttggagcccacatcgaagaagaagcgcttgttgtccaca

SEQ ID NO: 1855 - DNA, 50 bp, Mus musculus
tcgggaggctgatgcaactttccctttaagaaagccacctgggcgcaccg

SEQ ID NO: 1856 - DNA, 50 bp, Mus musculus
gaaggaccctttcctctcgccatgctaattcagaaaatctgctcttaacg

SEQ ID NO: 1857 - DNA, 50 bp, Mus musculus
aaagaaaaccatgacaactgtttgtacctcttgctttattattacatccg

SEQ ID NO: 1858 - DNA, 50 bp, Mus musculus
gccagcaactgtgccaggagcggctggcacgggctcgtgcccaggaggcg

SEQ ID NO: 1859 - DNA, 50 bp, Mus musculus
cgattcagctcttgctgaaggcctttaactagctgtttgaaataagaaaa

SEQ ID NO: 1860 - DNA, 50 bp, Mus musculus
cggcttctgctgtgttgccttgaaatttattattctggagatttaaagaa

SEQ ID NO: 1861 - DNA, 50 bp, Mus musculus
gcgagctcgattctcagctgtcagcaaaggcagcattgatctgctgagcg

SEQ ID NO: 1862 - DNA, 50 bp, Mus musculus
taattacctttgcagagccagcagatggtgcagaaagcactgcattgtcg

SEQ ID NO: 1863 - DNA, 50 bp, Mus musculus
cggaacataaggtttaagaaacacacacacgttttctggggtctcttgtt

SEQ ID NO: 1864 - DNA, 50 bp, Mus musculus
cggctctgacgaacagacctgtcctgagcctgccggtcagtgcatagaag

SEQ ID NO: 1865 - DNA, 50 bp, Mus musculus
cgtgccacccagctgctgcatggtcacgtccatctggagctctctagcta

SEQ ID NO: 1866 - DNA, 50 bp, Mus musculus
gggctgtgggtgccgctgagcaagatggagctgtctgcagtgggcgagcg

SEQ ID NO: 1867 - DNA, 50 bp, Mus musculus
ccttgcgcttgaagcgctgctggcacaccgggcactggtagggcttctcg

SEQ ID NO: 1868 - DNA, 50 bp, Mus musculus
tcatacccaatttattaccgctgaacatatggccaatattttgactcacg

SEQ ID NO: 1869 - DNA, 50 bp, Mus musculus
acagcttcttggtgctcatgttttctataattgccccagccatttttgcg

SEQ ID NO: 1870 - DNA, 50 bp, Mus musculus
cgcagaaaattcgcaaatcctttgattgtctgtttaaaatgaggaggaaa

SEQ ID NO: 1871 - DNA, 50 bp, Mus musculus
cacaaatgtctcttgcattttcttgcctcagaagtgaaaccatcatatcg

SEQ ID NO: 1872 - DNA, 50 bp, Mus musculus
gcttattgtgtgtctttctttcatactgctaatccggtttacacatcacg

SEQ ID NO: 1873 - DNA, 50 bp, Mus musculus
aggacccggccggccgcctgtttatattagcgcggtgtaaaatattctcg

SEQ ID NO: 1874 - DNA, 50 bp, Mus musculus
aaccgagattggagtcatatgggccataaatcattgagacatactctccg

SEQ ID NO: 1875 - DNA, 50 bp, Mus musculus
tactcactgttcctgactgtggcatagcaaacacatcaatcactctgacg

SEQ ID NO: 1876 - DNA, 50 bp, Mus musculus
cagatcctggaggctgtgctacactgccatcagatgggcgtggtccatcg

SEQ ID NO: 1877 - DNA, 50 bp, Mus musculus
cgagctcatggtcattaatttgtgaagtgcaaaaatactaatttttctcg

SEQ ID NO: 1878 - DNA, 50 bp, Mus musculus
cgcacacacaggctgctgggtaagtggcaagatggctcccctgcatgtct

SEQ ID NO: 1879 - DNA, 50 bp, Mus musculus
ttagtggccacagcacgattctgaaaatataccttccttacgatttaacg

SEQ ID NO: 1880 - DNA, 50 bp, Mus musculus
gggaaggcagccaggtttcgggtgggctggtcctgcagggactgggatcg

SEQ ID NO: 1881 - DNA, 50 bp, Mus musculus
accacatgttgcaaggttcaaatagtgcctaatgaaacagtgactaaacg

SEQ ID NO: 1882 - DNA, 50 bp, Mus musculus
cggaggcatatggtctcgtacacaagaaataatgttcatgttaaatcaga

SEQ ID NO: 1883 - DNA, 50 bp, Mus musculus
catttagacacaagcgagaggatcatggcggatggccccaggtgtaagcg

SEQ ID NO: 1884 - DNA, 50 bp, Mus musculus
cggccccagtgtgagctcatacatcagggctgacaggctccaaaagcccc

SEQ ID NO: 1885 - DNA, 50 bp, Mus musculus
gcccgcgtggtgggggctggggctggccagcagctcctgctcatggcccg

SEQ ID NO: 1886 - DNA, 50 bp, Mus musculus
cgaggggaaaaattaatttctgcctatcgttaattgagagaattgtgtgg

SEQ ID NO: 1887 - DNA, 50 bp, Mus musculus
cggcatgacaggcagcaatcctgtgtcccctgcctcatccagttccccag

SEQ ID NO: 1888 - DNA, 50 bp, Mus musculus
cgcggtttgtcccgttgacagcgtaatttaaagaaatatatggaaggctg

SEQ ID NO: 1889 - DNA, 50 bp, Mus musculus
cggccgctccataggtcgagaaatgcctcactggatcataggcggtggaa

SEQ ID NO: 1890 - DNA, 50 bp, Mus musculus
cgtttgaagaaaccattatgacaagcaggtctagggaagctgctgcaaaa

SEQ ID NO: 1891 - DNA, 50 bp, Mus musculus
cccgcaatgaagtcagcactctgcttattaagtggaaaaagctgtgctcg

SEQ ID NO: 1892 - DNA, 50 bp, Mus musculus
cgcatggaagaagagtgctgttaaggcctctccattaatcaacaggtatg

SEQ ID NO: 1893 - DNA, 50 bp, Mus musculus
cacttgccttccgaacaactgcacaacaggtgcaaattaaaatgaaaacg

SEQ ID NO: 1894 - DNA, 50 bp, Mus musculus
atttttagggcctcctccagaggctcaggcccaaacagatgtccctctcg

SEQ ID NO: 1895 - DNA, 50 bp, Mus musculus
gggtagcggcaaacttcaaagccataaatcttccctctgactggctggcg

SEQ ID NO: 1896 - DNA, 50 bp, Mus musculus
cctgcccctccctacctcacaggcatgttgtgagaataaatgaggtaacg

SEQ ID NO: 1897 - DNA, 50 bp, Mus musculus
cggctctgtggcactcatacagctagataaccaaagagagaaacgggcct

SEQ ID NO: 1898 - DNA, 50 bp, Mus musculus
ttcagttgggtgggtggagctgttatgcaaactcccgctctcctcattcg

SEQ ID NO: 1899 - DNA, 50 bp, Mus musculus
ggaaacccgcagctaatggctcggcagtgatgcgccaggtgtgggcctcg

SEQ ID NO: 1900 - DNA, 50 bp, Mus musculus
attaagcgagtctgacagcagcatattcaggctcgacaagggaacaggcg

SEQ ID NO: 1901 - DNA, 50 bp, Mus musculus
cgccccggctggattggccgagcaagcctggaaaatggtaaatgatcatt

SEQ ID NO: 1902 - DNA, 50 bp, Mus musculus
cgccatcagccccctagccagccatctgctccgaaccaaatggcgttttt

SEQ ID NO: 1903 - DNA, 50 bp, Mus musculus
cagcctgtcaccttcaggcaaaattcaaaaattctgtttttatcaaaacg

SEQ ID NO: 1904 - DNA, 50 bp, Mus musculus
cctcttctggctgctcagctgctgctgctgccgcttactgaagtcctgcg

SEQ ID NO: 1905 - DNA, 50 bp, Mus musculus
cgggccccaaatccccatgtggtcccgacatcattgacatggcggaatcc

SEQ ID NO: 1906 - DNA, 50 bp, Mus musculus
cgcgcaaattgcaaagttgtgaatatgttctcagataatgagccttccca

SEQ ID NO: 1907 - DNA, 50 bp, Mus musculus
cgctggtgtgacaaatcagatgaagatgattggtcaaaaccactcccacc

SEQ ID NO: 1908 - DNA, 50 bp, Mus musculus
ccaggaggtgcccgcgggcggtggagggctgctgcaggtgcgtctgcacg

SEQ ID NO: 1909 - DNA, 50 bp, Mus musculus
cgccaaggaagtgctgccccagtatttcaagcatagcaacatggcgagct

SEQ ID NO: 1910 - DNA, 50 bp, Mus musculus
cgcggacccgcccagagatataaataacattatctgaggagggacattcc

SEQ ID NO: 1911 - DNA, 50 bp, Mus musculus
cgggtattgctggtgctgctgcaccttctgcttggacccgccaagcagga

SEQ ID NO: 1912 - DNA, 50 bp, Mus musculus
cgaagcagatttcttcacactggagtcattcacatcatgccatctcttcg

SEQ ID NO: 1913 - DNA, 50 bp, Mus musculus
ttcctagagcaggcccagcaggtgagcgggctcctggcgcagctgtggcg

SEQ ID NO: 1914 - DNA, 50 bp, Mus musculus
caatcattggaacaaatagctaacatttaacgtttacacccgcactggcg

SEQ ID NO: 1915 - DNA, 50 bp, Mus musculus
cgtgtgtttgtgcactgcagttggtggtggaaactaaggcagtggatctg

SEQ ID NO: 1916 - DNA, 50 bp, Mus musculus
cgacggagacctttgtgaaggatatcaagcctgggctcaagaatctgaac

SEQ ID NO: 1917 - DNA, 50 bp, Mus musculus
cgtcctccagatcgctgaaaaggagcaggagctgttggcctctcaagaga

SEQ ID NO: 1918 - DNA, 50 bp, Mus musculus
gttccttcacagaggccaagatgctggcggtcgactccacctctgagtcg

SEQ ID NO: 1919 - DNA, 50 bp, Mus musculus
cggcccgggaaccctgggctgctggcgcctgcgcagagccctctgtccca

SEQ ID NO: 1920 - DNA, 50 bp, Mus musculus
cgtctttttgacgcagggagaaatggcaaattttaagtacgtcattaata

SEQ ID NO: 1921 - DNA, 50 bp, Mus musculus
cgtgattacaatggcttatttcatggaatattaagttcaaattttgctcc

SEQ ID NO: 1922 - DNA, 50 bp, Mus musculus
cggccagagaagttcaaacaatctggaaactggaggtaacaggtgattta

SEQ ID NO: 1923 - DNA, 50 bp, Mus musculus
cggcattgatcgtccctgagctcattatgtcacagctggggaacagctgg

SEQ ID NO: 1924 - DNA, 50 bp, Mus musculus
cggggagttctcctggcccaagaatgtgaagaccaactatgttgtttggg

SEQ ID NO: 1925 - DNA, 50 bp, Mus musculus
cgcgctggaagtgggagctgatgagtgaaaagaaaaaaaagtctttggat

SEQ ID NO: 1926 - DNA, 50 bp, Mus musculus
aactttttgttttctcctttctttgaaggttgtcagacgttaccgagtcg

SEQ ID NO: 1927 - DNA, 50 bp, Mus musculus
tatccttttgatggctataatttattccaaatcgtccctggactgaaacg

SEQ ID NO: 1928 - DNA, 50 bp, Mus musculus
tcccttttcattaataatgaaaaccagggggcaataaaatgttcttaacg

SEQ ID NO: 1929 - DNA, 50 bp, Mus musculus
gctttggtatgtaattatgcaaaacactttccataaagacttgccattcg

SEQ ID NO: 1930 - DNA, 50 bp, Mus musculus
ctcaaagtccacttgcgacaggaactggttatacaggacacctggggtcg

SEQ ID NO: 1931 - DNA, 50 bp, Mus musculus
cgactccaagatgtcagtctccatgaggtcacactccatgctactgtggt

SEQ ID NO: 1932 - DNA, 50 bp, Mus musculus
catttttgtttttctatcagctgaaatcgctctagcatttgctctacgcg

SEQ ID NO: 1933 - DNA, 50 bp, Mus musculus
cggcctctccaaactgattgattagtcatgatccccgcagttttaacagg

SEQ ID NO: 1934 - DNA, 50 bp, Mus musculus
tttaaaacgcccaacgctgccaagtcagaaaagcgtctcctgataaagcg

SEQ ID NO: 1935 - DNA, 50 bp, Mus musculus
gtgtaatatggcgaagacctacgattacctgttcaagctgctgctgatcg

SEQ ID NO: 1936 - DNA, 50 bp, Mus musculus
ctttaacatttgggatgctgcaaatgccgaagttaaatgaaatacctccg

SEQ ID NO: 1937 - DNA, 50 bp, Mus musculus
gcttgtcagtgtgatgaagattggcacccaggtaagctgtcactcaaccg

SEQ ID NO: 1938 - DNA, 50 bp, Mus musculus
cgggccagacaactctattattggcttcataattgcttaattaaactttt

SEQ ID NO: 1939 - DNA, 50 bp, Mus musculus
cgtcaaattgcctcccagggtgctgcagtggagcgcactgattcgtaccc

SEQ ID NO: 1940 - DNA, 50 bp, Mus musculus
ctggtgatgtaacacccatgtcaatacttcccagtgaacgcacgtgttcg

SEQ ID NO: 1941 - DNA, 50 bp, Mus musculus
cggagatcatagacacggaaactgtgcaacacaggaccaactcctgctaa

SEQ ID NO: 1942 - DNA, 50 bp, Mus musculus
acacaggaccaactcctgctaatgctgaggtatttgggaaagcctgatcg

SEQ ID NO: 1943 - DNA, 50 bp, Mus musculus
tggaggatgatgacagaggtcaggcttcgctaatgggccagtgaggagcg

SEQ ID NO: 1944 - DNA, 50 bp, Mus musculus
cccgggatttggttggaattaatctgcatctctagccagggtctcatgcg

SEQ ID NO: 1945 - DNA, 50 bp, Mus musculus
aggtacaggatggtccctttgagcactgcgtagaatttcttccagccacg

SEQ ID NO: 1946 - DNA, 50 bp, Mus musculus
tgctcactctggttgccgcactggcccagctgcagggtgatgatctcccg

SEQ ID NO: 1947 - DNA, 50 bp, Mus musculus
cgctggcctgggctaatagtgcatggtcgcttgcttggatgttctgagtg

SEQ ID NO: 1948 - DNA, 50 bp, Mus musculus
cggtttctgtaaaagcatcgttaggaagtgggaaccatgcctttaattct

SEQ ID NO: 1949 - DNA, 50 bp, Mus musculus
tctctcatctcgctcggctgcgggaaatcgggctgaagcgactgagtccg

SEQ ID NO: 1950 - DNA, 50 bp, Mus musculus
ttcccgccaattattatggttgcttggctattgaagattgtgagctgacg

SEQ ID NO: 1951 - DNA, 50 bp, Mus musculus
cgggccccggtgtccccggccagcactatgcccatcttactgttcctgat

SEQ ID NO: 1952 - DNA, 50 bp, Mus musculus
cgtgatctgatccctaagttgagacctgtcttcctgtaacgcttccgaat

SEQ ID NO: 1953 - DNA, 50 bp, Mus musculus
aatttgattactataaccatactttttaactgctgtcaggaaagacagcg

SEQ ID NO: 1954 - DNA, 50 bp, Mus musculus
cggcaggtggaggattaccctgtggacatctactacttgatggacctgtc

SEQ ID NO: 1955 - DNA, 50 bp, Mus musculus
gaacgtggactagaccctgacacactaccatctccttcctccaaggctcg

SEQ ID NO: 1956 - DNA, 50 bp, Mus musculus
cgactgtgaaagccacctggagccaccttgccgggattgtacctgcaggc

SEQ ID NO: 1957 - DNA, 50 bp, Mus musculus
gctgccttggcagaattcagctctatgaatcacttcggaaaattggttcg

SEQ ID NO: 1958 - DNA, 50 bp, Mus musculus
ctgtgatccattcatttctcgctctacctcctgttgcataaaatgatgcg

SEQ ID NO: 1959 - DNA, 50 bp, Mus musculus
cggccgtgctcaacaacgccttctacctggagaacctgcacttcaccatc

SEQ ID NO: 1960 - DNA, 50 bp, Mus musculus
tttggctcgcctcaccggcagtaatttaatttttccttcattctgactcg

SEQ ID NO: 1961 - DNA, 50 bp, Mus musculus
cggcctcctatggtcatgctgtagagacaggagatatgcttgttcttgtt

SEQ ID NO: 1962 - DNA, 50 bp, Mus musculus
cggctgttgatcaaagtgttttctggaatggaaatattgatgacaggaga

SEQ ID NO: 1963 - DNA, 50 bp, Mus musculus
cgaggccgttcacagtacgacgaacgtgtttccgctggggaaccttcaca

SEQ ID NO: 1964 - DNA, 50 bp, Mus musculus
gttacaaaaccaaactctcaccacctccttctccagctgtaagctgtccg

SEQ ID NO: 1965 - DNA, 50 bp, Mus musculus
agggcggcatgctaatgtggaaatttaaagagccgctcggctttaaatcg

SEQ ID NO: 1966 - DNA, 50 bp, Mus musculus
gatcgaagtcattaacatattccatggccaggggactggtgggcaggtcg

SEQ ID NO: 1967 - DNA, 50 bp, Mus musculus
cgccggctttaaagtctctgccaggatccatgctcacatgttacttcctg

SEQ ID NO: 1968 - DNA, 50 bp, Mus musculus
cggctgcagatatatgcaatattaaagagcgcttatgaatttttgacatc

SEQ ID NO: 1969 - DNA, 50 bp, Mus musculus
cgccacttcagcctgaaactccacatgcgttgccatcagcacttcctgag

SEQ ID NO: 1970 - DNA, 50 bp, Mus musculus
agcagagcctggtgaatatgacatcccgcctgcgacacctggcagagacg

SEQ ID NO: 1971 - DNA, 50 bp, Mus musculus
cggcaaatcaggggcggggaactgtcagttgcaaccaaagcctgcctggc

SEQ ID NO: 1972 - DNA, 50 bp, Mus musculus
cgtgaagcagcagcagctgccacagcaggcaagcagatgtatgaatatag

SEQ ID NO: 1973 - DNA, 50 bp, Mus musculus
tgcctgtggcgctcccaggaaacacctttttacataagatattgcccacg

SEQ ID NO: 1974 - DNA, 50 bp, Mus musculus
acaatttagattacttcatctctgctagcaacaaactgaatgaaatttcg

SEQ ID NO: 1975 - DNA, 50 bp, Mus musculus
acacatcaaacaaatacttctgtctccggagaggagtgtgcgagagatcg

SEQ ID NO: 1976 - DNA, 50 bp, Mus musculus
cggtttccaggaaagaagagagaggcggaaaagttaactttccgccaccc

SEQ ID NO: 1977 - DNA, 50 bp, Mus musculus
cggcttgaagctgaaaggtggagtgtgtttctttattgaacactgcattc

SEQ ID NO: 1978 - DNA, 50 bp, Mus musculus
cgagggcttcataagcctttgatacagtctgatctttgaaacctttccaa

SEQ ID NO: 1979 - DNA, 50 bp, Mus musculus
ttggtggcagtgtcagagtgacgtggtaggtctccatggagacggcagcg

SEQ ID NO: 1980 - DNA, 50 bp, Mus musculus
gggaaattttcttcattttaatgttctttcacaacccacattcagtttcg

SEQ ID NO: 1981 - DNA, 50 bp, Mus musculus
cgatcctcaatcagtgggtggaggataacagggtagattcacttgtgtgc

SEQ ID NO: 1982 - DNA, 50 bp, Mus musculus
cggagatgtagaagatattacaagctactggatgcactgtcagattaact

SEQ ID NO: 1983 - DNA, 50 bp, Mus musculus
acagccctctccaaaacacatcataaaactaagactgagatgaagcatcg

SEQ ID NO: 1984 - DNA, 50 bp, Mus musculus
cgtcatctatgggttctggtagtcctgggagaggcagggaaatgtcctcg

SEQ ID NO: 1985 - DNA, 50 bp, Mus musculus
cggccacgaagaggatttggaggcgccgcaagtcaatatttgatcacaaa

SEQ ID NO: 1986 - DNA, 50 bp, Mus musculus
acagccttccatggtaaggcctgcgtggagctttcattgcacccagtacg

SEQ ID NO: 1987 - DNA, 50 bp, Mus musculus
gaattaatgccagacatagttttcctgaactctatccaaccgcctaagcg

SEQ ID NO: 1988 - DNA, 50 bp, Mus musculus
cggttatgtgttacaatgtgttatgtgataaatacgctacccggcagcta

SEQ ID NO: 1989 - DNA, 50 bp, Mus musculus
cgagagcttcctgagaagatgtctgaatttttatggccttctcattcagc

SEQ ID NO: 1990 - DNA, 50 bp, Mus musculus
cggagaaaatcaaggcggagatcacagtggggtaaaggaattattaagaa

SEQ ID NO: 1991 - DNA, 50 bp, Mus musculus
cctcccaccgtggacttgtagtgtttgctgaagctgtcctgggaatatcg

SEQ ID NO: 1992 - DNA, 50 bp, Mus musculus
cggcggccaaagccatgaaccgtcttctgttgtttgcagagttgatcttg

SEQ ID NO: 1993 - DNA, 50 bp, Mus musculus
cacctggggcagtgggtctccagctttacaccaatgccctaggggatgcg

SEQ ID NO: 1994 - DNA, 50 bp, Mus musculus
cggccaactaacaggtcagatgttcaagtatagacgagtcatcttgccca

SEQ ID NO: 1995 - DNA, 50 bp, Mus musculus
cggcagcaaattggaccggttgccatggcaaatctgagcccttaagtcat

SEQ ID NO: 1996 - DNA, 50 bp, Mus musculus
cctccttcttaagaagactttcccaggtccctcttggctgtggttgaacg

SEQ ID NO: 1997 - DNA, 50 bp, Mus musculus
gtcctttcaggttcaggcgcagctgcagctggacagcgctgtggcgcacg

SEQ ID NO: 1998 - DNA, 50 bp, Mus musculus
cgcagcagcaccgccatttgtcaaagtcaaccttctgattgctttggacc

SEQ ID NO: 1999 - DNA, 50 bp, Mus musculus
gctcctcgggacagttcccacactgcagtgcctctggtgaggagacagcg

SEQ ID NO: 2000 - DNA, 50 bp, Mus musculus
tcaccaataaaattggtctcagcatggagcgtaattgcaacaaagtgccg

SEQ ID NO: 2001 - DNA, 50 bp, Mus musculus
aatatccctcattaatgccactttatatttacagtgtgtcactggagacg

SEQ ID NO: 2002 - DNA, 50 bp, Mus musculus
cggatatcgggcacctccatggccttcaaaaacattgcctccaaaatagc

SEQ ID NO: 2003 - DNA, 50 bp, Mus musculus
gctgctcgctccatgatgagatgctaaatgaaaagctggtgcgacacacg

SEQ ID NO: 2004 - DNA, 50 bp, Mus musculus
cggcgtcccaccagtcttttggggggctgatgtacatgcaccacagctcc

SEQ ID NO: 2005 - DNA, 50 bp, Mus musculus
caataggcgagagacttcttgtttcctggcagagcggggtcccggcaccg

SEQ ID NO: 2006 - DNA, 50 bp, Mus musculus
catcattggatccttctttgttctcaacctagtcctgggagtgctttccg

SEQ ID NO: 2007 - DNA, 50 bp, Mus musculus
agaggacagcctttggagagctgccctgtctggggactggcccctccccg

SEQ ID NO: 2008 - DNA, 50 bp, Mus musculus
tgacgcggactaaatcattttcatttaatttccggtaaacaaaacccacg

SEQ ID NO: 2009 - DNA, 50 bp, Mus musculus
gttaccctgggtgtattttgtcagtctggtcatctttggatcctttttcg

SEQ ID NO: 2010 - DNA, 50 bp, Mus musculus
atgtaatcagcgcccatggggagccaggagcggagggtgatgacatcacg

SEQ ID NO: 2011 - DNA, 50 bp, Mus musculus
cgagatggacttctggaaggtggacctcaagttcctggacgactgttgca

SEQ ID NO: 2012 - DNA, 50 bp, Mus musculus
tacgttgttagcaagaatgccccatcaccacatctttccagagcctttcg

SEQ ID NO: 2013 - DNA, 50 bp, Mus musculus
cgggtgtctgactcgaatgacaagcgagctgattttttcagtacatagct

SEQ ID NO: 2014 - DNA, 50 bp, Mus musculus
aatctctcattccttgttgtcagcaattctcacctagtgcagagaattcg

SEQ ID NO: 2015 - DNA, 50 bp, Mus musculus
ccctacagactcaattagattcattaatctgctgtgtagacctgtaaacg

SEQ ID NO: 2016 - DNA, 50 bp, Mus musculus
cggggtaaccttgacacagttgcggcagtcgctaatggcagacacacact

SEQ ID NO: 2017 - DNA, 50 bp, Mus musculus
gtctaaccaatattaaaatgcggccactttttaaaaagccactttaaacg

SEQ ID NO: 2018 - DNA, 50 bp, Mus musculus
cgtttcaagaaatgcggttaacctcgcagtactaaaactgaatgaacaag

SEQ ID NO: 2019 - DNA, 50 bp, Mus musculus
tcacttcatttcgttcaatttcgttcaatttcattccttttcatccagcg

SEQ ID NO: 2020 - DNA, 50 bp, Mus musculus
cgtactttggctggctactcaccatcttcaaggtcgaggtttctggaaaa

SEQ ID NO: 2021 - DNA, 50 bp, Mus musculus
tagccagccaaagtacgatctaatacgggaggtaggccgaggtagttacg

SEQ ID NO: 2022 - DNA, 50 bp, Mus musculus
cggggcttgatgtctgcaaaatgtcggaaacgcagccaagagctgctaac

SEQ ID NO: 2023 - DNA, 50 bp, Mus musculus
attaaggcagcctgttattgtgcgaggctgaatcagtggctctttgtgcg

SEQ ID NO: 2024 - DNA, 50 bp, Mus musculus
cgcatgcggggcggaaaagattgtatttatcacctgtcaggatctgccag

SEQ ID NO: 2025 - DNA, 50 bp, Mus musculus
cgcagtctgaaaagccttcgacctaaagcaaaaaggtccccaagtgccac

SEQ ID NO: 2026 - DNA, 50 bp, Mus musculus
cggatctccccaggttccagaggattgggcccacaggggtcatgctcagt

SEQ ID NO: 2027 - DNA, 50 bp, Mus musculus
cgtgcgttcactgggaagtattgacatgggtgttacatcaccagcagcca

SEQ ID NO: 2028 - DNA, 50 bp, Mus musculus
cggcctgtacaaaatgcaatgaatcaggttgggattgtgctgaacgtaca

SEQ ID NO: 2029 - DNA, 50 bp, Mus musculus
atatagcagcttgctgttgattaccagggaaatgaactcgctgtctggcg

SEQ ID NO: 2030 - DNA, 50 bp, Mus musculus
cgctcatctctcacgacaatgaagacctcctagcgtccaggtttccggcc

SEQ ID NO: 2031 - DNA, 50 bp, Mus musculus
cgggcagcatcgatcgtggctcctttaagacaaactcagacagacatttt

SEQ ID NO: 2032 - DNA, 50 bp, Mus musculus
tccatcttctgccgcatcatgaggtaggcgataactagcgttggggagcg

SEQ ID NO: 2033 - DNA, 50 bp, Mus musculus
ccacgttcttatcatctcaattgccgattttcattttggtaacttggacg

SEQ ID NO: 2034 - DNA, 50 bp, Mus musculus
actacattaggaataaaaccttccacttaaacacttaaatgaaaacatcg

SEQ ID NO: 2035 - DNA, 50 bp, Mus musculus
aggctgtttgcaacaaccacttcaactctatttacagaagggttcccacg

SEQ ID NO: 2036 - DNA, 50 bp, Mus musculus
taaaccacagagtcaaatagctctaatagagatgaagcctgatagatccg

SEQ ID NO: 2037 - DNA, 50 bp, Mus musculus
gacacgtaaagaagcagcagtcctgccccagttctcctaagaaaaatccg

SEQ ID NO: 2038 - DNA, 50 bp, Mus musculus
cggccatgctcgaagccagctctgcagctcagccaatcagtgacatcatt

SEQ ID NO: 2039 - DNA, 50 bp, Mus musculus
cggggtgaaagtcggcttccaggcgttcgatctccagccttccagctcac

SEQ ID NO: 2040 - DNA, 50 bp, Mus musculus
ttgatgccattgtttctgctacagatggttcttttaaatacaataacacg

SEQ ID NO: 2041 - DNA, 50 bp, Mus musculus
cggggctggaagagcttccacgggatcctcaagggcatgatcctctacct

SEQ ID NO: 2042 - DNA, 50 bp, Mus musculus
cgcggaatatgtacattttttagtcttacttacgctttcagggggttgtg

SEQ ID NO: 2043 - DNA, 50 bp, Mus musculus
tggtgcatgtggctttgaactggagccgttcgcgtttcctgcagagagcg

SEQ ID NO: 2044 - DNA, 50 bp, Mus musculus
ggaaatgaatgacagcttacctgatgccaatcttcatcagactgacaccg

SEQ ID NO: 2045 - DNA, 50 bp, Mus musculus
atctgccgccaagtttccagggagtgacaggggacagcaggtacagatcg

SEQ ID NO: 2046 - DNA, 50 bp, Mus musculus
tgatggacacggagcttgctgcagcacctatgacgccagaaatcttgtcg

SEQ ID NO: 2047 - DNA, 50 bp, Mus musculus
cgcggctcataattgtttttcacacataagttatgcaaatgagcttttat

SEQ ID NO: 2048 - DNA, 50 bp, Mus musculus
cggccgatcagtgaatggtcaccccagtctgtccagtacaggtacctggc

SEQ ID NO: 2049 - DNA, 50 bp, Mus musculus
catactgcaagaatatttattgagcacaagctcaatcaccgcattgaacg

SEQ ID NO: 2050 - DNA, 50 bp, Mus musculus
cggcaacagtccccccagaacaggcggagtgtgtgtctgccattagcgac

SEQ ID NO: 2051 - DNA, 50 bp, Mus musculus
cgtgccccaggactcagagagccagctgcaggagcaggagaagcggattg

SEQ ID NO: 2052 - DNA, 50 bp, Mus musculus
cactcgcacttcgcattttctaattacaccatctgtgtcagactctttcg

SEQ ID NO: 2053 - DNA, 50 bp, Mus musculus
ccggtgtctgtgctattgctatgggaactggccatcctggggcggggccg

SEQ ID NO: 2054 - DNA, 50 bp, Mus musculus
aattcaggttagtggaggccgaggatcaaagcgctcacctcacgctatcg

SEQ ID NO: 2055 - DNA, 50 bp, Mus musculus
cctgtttatattagcgcggtgtaaaatattctcgctgtcttggggaatcg

SEQ ID NO: 2056 - DNA, 50 bp, Mus musculus
ctttgttagcacagctcagttcaaatgtctgattagtccttaggagatcg

SEQ ID NO: 2057 - DNA, 50 bp, Mus musculus
actttcctacttaccaaacccgtcgccattaccaagtctttcaagcttcg

SEQ ID NO: 2058 - DNA, 50 bp, Mus musculus
cgagtttgcacttctgtttacaaagcaatcctgccatcaaaagaggaaca

SEQ ID NO: 2059 - DNA, 50 bp, Mus musculus
cgatgggataatgagacagatgtctctcaactggaaggacattttgacat

SEQ ID NO: 2060 - DNA, 50 bp, Mus musculus
taagtgcacgcttcccccactatatagcagcagactgtgttgcccctacg

SEQ ID NO: 2061 - DNA, 50 bp, Mus musculus
ctgctttttggtccatgtttaaaaagcaccagtgacctttttttattccg

SEQ ID NO: 2062 - DNA, 50 bp, Mus musculus
cgtgcacagctttggaacttttggctattcggtatttgtgagttttggaa

SEQ ID NO: 2063 - DNA, 50 bp, Mus musculus
agtgttcaaatcgacatcatggagtccatttctccttcgactagcattcg

SEQ ID NO: 2064 - DNA, 50 bp, Mus musculus
tcaccatggagcccaggatggcctgcagcagcagcagcacgatgccctcg

SEQ ID NO: 2065 - DNA, 50 bp, Mus musculus
cgtgcacctggcttgtccccgagcgtaatattcttcaatggaaacggatc

SEQ ID NO: 2066 - DNA, 50 bp, Mus musculus
ggagaagttcacattccggattctgctccgctgcccaaggtgcaattccg

SEQ ID NO: 2067 - DNA, 50 bp, Mus musculus
cggacagatcgattactcagacacaaacggatgtgccaagggtgccagtc

SEQ ID NO: 2068 - DNA, 50 bp, Mus musculus
ttgaattttcttcacaatttgtagacaatttgatggattaggtccccgcg

SEQ ID NO: 2069 - DNA, 50 bp, Mus musculus
agccttaatatcttactttgcaaatatagtttattccttcaataaagccg

SEQ ID NO: 2070 - DNA, 50 bp, Mus musculus
aagccccattgccctcttctttctaagctgtcatcctcctgctgcaatcg

SEQ ID NO: 2071 - DNA, 50 bp, Mus musculus
gcacgtccgttacaaataggtagttttgtttctcttgttgtcgctacacg

SEQ ID NO: 2072 - DNA, 50 bp, Mus musculus
atttgcatttctccctcatgcaacgcccctttatgtaatccatacaaacg

SEQ ID NO: 2073 - DNA, 50 bp, Mus musculus
cgcctgctcctcgttgatgggctggttgtacagccgcaggatctcctcca

SEQ ID NO: 2074 - DNA, 50 bp, Mus musculus
cggtggcaccagctcctgcacaggccacaatgaacaggtgataggacatg

SEQ ID NO: 2075 - DNA, 50 bp, Mus musculus
cggggtgaatttaattgctttagttaagtggaaatcgggttaaaaatgat

SEQ ID NO: 2076 - DNA, 50 bp, Mus musculus
gacctgtcgtgccctgcatgttcagagtctgtcatgtttggtcaagaacg

SEQ ID NO: 2077 - DNA, 50 bp, Mus musculus
gacaacagcgatgaggatgtggtgcagcaccaggaccatgctcgcagccg

SEQ ID NO: 2078 - DNA, 50 bp, Mus musculus
ccgcggctatgcccagtcctgccgcttcaagagggtgcagcagagacacg

SEQ ID NO: 2079 - DNA, 50 bp, Mus musculus
cgggcgatcctccgactgctcggcgccaaccacaacatgctacccaccgt

SEQ ID NO: 2080 - DNA, 50 bp, Mus musculus
cgcgtggcagtgtggatcctggagaagtattaccatgacttccctgtcta

SEQ ID NO: 2081 - DNA, 50 bp, Mus musculus
ttgcccgtgctgtacctgttctgtggatgaacagaggacttcagtctgcg

SEQ ID NO: 2082 - DNA, 50 bp, Mus musculus
atcagggccttattcattagcgcataaacaattttgtttctcggcactcg

SEQ ID NO: 2083 - DNA, 50 bp, Mus musculus
cgcacccaccatgatggaagacgacgggcagccccggactctgtgagtac

SEQ ID NO: 2084 - DNA, 50 bp, Mus musculus
ttttcaatacaaccagatcattgcagataattgtattacacagtgtatcg

SEQ ID NO: 2085 - DNA, 50 bp, Mus musculus
atcggtcattcataattaactagtgataatgttctacactaatttgtccg

SEQ ID NO: 2086 - DNA, 50 bp, Mus musculus
tgcttacacctgactaaatcatcaggctgaaatcggagccgactcccacg

SEQ ID NO: 2087 - DNA, 50 bp, Mus musculus
tgattaaaataattacaaattgcaccctgacaagcaagagcaaaatttcg

SEQ ID NO: 2088 - DNA, 50 bp, Mus musculus
agctacactggttgattattgcaggaatgaaaggcactctgaccttgtcg

SEQ ID NO: 2089 - DNA, 50 bp, Mus musculus
cgcctgctcctgttatcaatagcaaatatggactcagagaaacagataaa

SEQ ID NO: 2090 - DNA, 50 bp, Mus musculus
cgggagataagacacctaattgagaaaacatttgcagtggcatgtggggc

SEQ ID NO: 2091 - DNA, 50 bp, Mus musculus
catatttctcgccggatcgatacgtttgactcccgacaagacaataatcg

SEQ ID NO: 2092 - DNA, 50 bp, Mus musculus
agcgttacctctctagctttttgtgcggcaagctcagcttgtctctgtcg

SEQ ID NO: 2093 - DNA, 50 bp, Mus musculus
cgggtgagagttcagagttcagcagcagcagcccgagcccatgattccca

SEQ ID NO: 2094 - DNA, 50 bp, Mus musculus
cgagttcatgtgccagccacattcagaacagggtgttctgtgctcttcaa

SEQ ID NO: 2095 - DNA, 50 bp, Mus musculus
cggtattcatttctgtgtatccctgccaaagatccattgtgtaatgttgt

SEQ ID NO: 2096 - DNA, 50 bp, Mus musculus
attaatcctagatgtacaattccattaataaggccgctttttaataggcg

SEQ ID NO: 2097 - DNA, 50 bp, Mus musculus
cggccgacgctgagatccatgccattgtagccgtagccgtacctgccgga

SEQ ID NO: 2098 - DNA, 50 bp, Mus musculus
cggctcaaggtcatctatggctccagtgctggcttccatgctgtggatgt

SEQ ID NO: 2099 - DNA, 50 bp, Mus musculus
cgcctcatttagctgtttattgcgcctgagtacgtgttgcagctgtcatc

SEQ ID NO: 2100 - DNA, 50 bp, Mus musculus
ccaaagtatatgtgacctaaaaaggcattgctcattctgacacatatacg

SEQ ID NO: 2101 - DNA, 50 bp, Mus musculus
cgggtgacttcccagctgcagaatcctggctgcaattagagacctatacg

SEQ ID NO: 2102 - DNA, 50 bp, Mus musculus
ctccttactgtggtactaaccatcctagcggatgggggatttgtcctacg

SEQ ID NO: 2103 - DNA, 50 bp, Mus musculus
cggaactagatggttatagggacggctccaatccaggacagacaaaatga

SEQ ID NO: 2104 - DNA, 50 bp, Mus musculus
cgggataaattagtgaaagggaagaaagaataagaagaaaggactgaaaa

SEQ ID NO: 2105 - DNA, 50 bp, Mus musculus
aactctcttttatttccaacagccctaatcagccgctctcattacaaacg

SEQ ID NO: 2106 - DNA, 50 bp, Mus musculus
cggtggagggaaaggggaaaggagccattttctgctgcacatcagtcagt

SEQ ID NO: 2107 - DNA, 50 bp, Mus musculus
taattactcgattaaaacctattacacttattaggggccgctattgatcg

SEQ ID NO: 2108 - DNA, 50 bp, Mus musculus
tagggcttgtgcacagcgccgtcatgtgagcgcacgtggtagctcatgcg

SEQ ID NO: 2109 - DNA, 50 bp, Mus musculus
tcctgttattcataagcgagtttcctctctcacaaagaaccttttgcacg

SEQ ID NO: 2110 - DNA, 50 bp, Mus musculus
cggcaaatgaagtaatctgcaaagtctgtgaactcatttgcataattgat

SEQ ID NO: 2111 - DNA, 50 bp, Mus musculus
cgccccttaagaattgtaatatttctgtgtggtaatgataaacattagtg

SEQ ID NO: 2112 - DNA, 50 bp, Mus musculus
cgcgtcaccacatgtccaaaatattcattgcatcaattcaagggcagtga

SEQ ID NO: 2113 - DNA, 50 bp, Mus musculus
atcaccgcggtttatttaaggagccagccctcgtctttgataaactatcg

SEQ ID NO: 2114 - DNA, 50 bp, Mus musculus
cgtctctataagcagtgttttagcttaagtggcagttgcatattaattac

SEQ ID NO: 2115 - DNA, 50 bp, Mus musculus
cgtgccaaatctgacagtgataaaatctcaaatggctctagcatcaactg

SEQ ID NO: 2116 - DNA, 50 bp, Mus musculus
cgggccacctcataccgacggtccctggttaaatacatattgaagagaaa

SEQ ID NO: 2117 - DNA, 50 bp, Mus musculus
cgttcccacgtcatacatagatgtaactctagagaaaaacagtaaaggtg

SEQ ID NO: 2118 - DNA, 50 bp, Mus musculus
cgggaatttcacttgctgtgcagatcccgctgtccggctgtcagacaccc

SEQ ID NO: 2119 - DNA, 50 bp, Mus musculus
tgtttacttcctccagaaacaagagcatcatcagcacgctcagtgcatcg

SEQ ID NO: 2120 - DNA, 50 bp, Mus musculus
cggggaagaaggaccttgtaataaataatattctgcacatcaaatcactt

SEQ ID NO: 2121 - DNA, 50 bp, Mus musculus
cgcacgatgacgtcaaacgctgctatggcaaccgttgattggtgcccaca

SEQ ID NO: 2122 - DNA, 50 bp, Mus musculus
cgggggtcaaaaaatcgcttcaggctgcaactttaccttagagacgtttt

SEQ ID NO: 2123 - DNA, 50 bp, Mus musculus
cggggttggttgttatctttggttatctagctgtatgagtggtgtggagt

SEQ ID NO: 2124 - DNA, 50 bp, Mus musculus
cggatggaaatgcccataaagccgtatcaaaccctgtgcagagaaggaca

SEQ ID NO: 2125 - DNA, 50 bp, Mus musculus
ttgtcattcagtttatccagttttggtcacccattttatttatttatgcg

SEQ ID NO: 2126 - DNA, 50 bp, Mus musculus
gcccagaggaggcgagatcacccgcactaatttgtacatatccttatacg

SEQ ID NO: 2127 - DNA, 50 bp, Mus musculus
gcggcactgggaaacccagcaaagctaaagctatgctggaggcggggacg

SEQ ID NO: 2128 - DNA, 50 bp, Mus musculus
cggcggcggcagctgcagtgacatgtccagcatgaatcccgaatagtgag

SEQ ID NO: 2129 - DNA, 50 bp, Mus musculus
gcatcaaagggatgcagcttctccaggcccatgaaggtgatgttgtagcg

SEQ ID NO: 2130 - DNA, 50 bp, Mus musculus
ctcatttgagaagagcagcatttgaggcagcagcgttcgcctgctgaacg

SEQ ID NO: 2131 - DNA, 50 bp, Mus musculus
cgctcagttccaagcaggtatttggctgcgattaagtctccaatcgggct

SEQ ID NO: 2132 - DNA, 50 bp, Mus musculus
caggtcaactacaatgatggctcccaggaggaccgaggtgtgtgtggccg

SEQ ID NO: 2133 - DNA, 50 bp, Mus musculus
cggcggaaggaacaccagcgacgcttctactgggctatgatgtatgaata

SEQ ID NO: 2134 - DNA, 50 bp, Mus musculus
cccaaagtaaataatacagtcggtatataaatctttccattaaactatcg

SEQ ID NO: 2135 - DNA, 50 bp, Mus musculus
cgtgtttccgctggggaaccttcacactgttggggaagatttttatagtc

SEQ ID NO: 2136 - DNA, 50 bp, Mus musculus
cgcatacattcacaaagttctctgcggctgaggtagcggaagacagacat

SEQ ID NO: 2137 - DNA, 50 bp, Mus musculus
tcggctgttttataaaaggacaaaacagcaagtgtctgcattgcatctcg

SEQ ID NO: 2138 - DNA, 50 bp, Mus musculus
cgggtggaggtgcgcttctgacaagcccgaaagtcatttccaatctcaag

SEQ ID NO: 2139 - DNA, 50 bp, Mus musculus
ccgtcacgaacaggattcgaacctgtgcggggaaaccccattggatttcg

SEQ ID NO: 2140 - DNA, 50 bp, Mus musculus
cactgaggccgtggatcaggggggcgctgttagacctcctgaggcccccg

SEQ ID NO: 2141 - DNA, 50 bp, Mus musculus
actttgctgacagcttgtcacatttcactgactgtctgtctggggtaccg

SEQ ID NO: 2142 - DNA, 50 bp, Mus musculus
caactccacaattaccttatatttaattaatattttttctcctctttacg

SEQ ID NO: 2143 - DNA, 50 bp, Mus musculus
agaggttgaggtacaggcagtcctcgctctggttctgcacgtaggtggcg

SEQ ID NO: 2144 - DNA, 50 bp, Mus musculus
ctccccttcaacaggatgtctctcagctcgggcgacatgaagtagggtcg

SEQ ID NO: 2145 - DNA, 50 bp, Mus musculus
cgagttcttggtgaaaatgcaattgctgttcgaacaaaagccatgaagtg

SEQ ID NO: 2146 - DNA, 50 bp, Mus musculus
tgcatgaagtataatgctaaagacacaattttccaccgagcagctgtccg

SEQ ID NO: 2147 - DNA, 50 bp, Mus musculus
cgtgtgacaaaaacagacacttactgccgtagggagagttagcggaggag

SEQ ID NO: 2148 - DNA, 50 bp, Mus musculus
cgtccatttatctgatccaagtgctctgaaaaactgccaactgtacaaag

SEQ ID NO: 2149 - DNA, 50 bp, Mus musculus
ggcctaaacacaataggactcgccattttctccttgtgaagcacaaagcg

SEQ ID NO: 2150 - DNA, 50 bp, Mus musculus
aatgtgcctacccatcgctgttgctccttgcagcctgcgggtcctcttcg

SEQ ID NO: 2151 - DNA, 50 bp, Mus musculus
tgctcagcctgtgccttgaactcggtggtgcagagcgtgctgagcaagcg

SEQ ID NO: 2152 - DNA, 50 bp, Mus musculus
tgcgaggaagatgggttaatattctgtgcattctttgccaccttcattcg

SEQ ID NO: 2153 - DNA, 50 bp, Mus musculus
cgccatatggtcttcccggtccagccaagagcctggaaccacgtgacctg

SEQ ID NO: 2154 - DNA, 50 bp, Mus musculus
catcgatatccacagctgcaaccacgaggctgagaagctgggctgcagcg

SEQ ID NO: 2155 - DNA, 50 bp, Mus musculus
cgactatttaatgagtcattcagccaggatgattttctgtctgaatatgt

SEQ ID NO: 2156 - DNA, 50 bp, Mus musculus
cgtatccccctgcggagacaggtaacagaaagtagataaagagtttaaag

SEQ ID NO: 2157 - DNA, 50 bp, Mus musculus
cgccgaaattgaatgcatcgtttcttaataaatccaggcctggactcaga

SEQ ID NO: 2158 - DNA, 50 bp, Mus musculus
atactgagggttagtggaccgtgttacatacgtcacagataaagcgtacg

SEQ ID NO: 2159 - DNA, 50 bp, Mus musculus
cggcatcatgaagcagaattaaagtaggcatctgtgttctccggcattaa

SEQ ID NO: 2160 - DNA, 50 bp, Mus musculus
cgaggtaccgaggaaaacaaacaatggattgttacagtacatacattctg

SEQ ID NO: 2161 - DNA, 50 bp, Mus musculus
cgagggaagacaatctgcttctcgcattattagacacgcttggagttcag

SEQ ID NO: 2162 - DNA, 50 bp, Mus musculus
cgaagtgtctgcaatgaaccccgtgaatgctactgctctctacatttccg

SEQ ID NO: 2163 - DNA, 50 bp, Mus musculus
ctaattgaagtgacggctttggagattatggggaacatatggccctaccg

SEQ ID NO: 2164 - DNA, 50 bp, Mus musculus
cgggcagatttattccgctgccaagcctgcagaaaattgacttgttcatg

SEQ ID NO: 2165 - DNA, 50 bp, Mus musculus
aggagggcgagacccccggcaatttcatggaggacgagcaatggctgtcg

SEQ ID NO: 2166 - DNA, 50 bp, Mus musculus
cgcacataccaggagaaaggtagtcccagtggggagtgacaaagcttaat

SEQ ID NO: 2167 - DNA, 50 bp, Mus musculus
ctttgaatgcttataaaactccacataaaatcggactgacccaaaacacg

SEQ ID NO: 2168 - DNA, 50 bp, Mus musculus
gtgaaagaggtcaacagcggtttaacactttggttcaagcaaggcactcg

SEQ ID NO: 2169 - DNA, 50 bp, Mus musculus
cgcctgaacctgaaaggacaagggcgtcacgttgcaatgactatcctagg

SEQ ID NO: 2170 - DNA, 50 bp, Mus musculus
tttagggggttggctcctactctgctaggactgtgtgcgcggagcatgcg

SEQ ID NO: 2171 - DNA, 50 bp, Mus musculus
ccttgccgcagatggtggtcttgtagtcgccaaagatctgcctgactgcg

SEQ ID NO: 2172 - DNA, 50 bp, Mus musculus
tgcgatgctaatggcaggtgcctcttggcagcactgaccatggacaatcg

SEQ ID NO: 2173 - DNA, 50 bp, Mus musculus
cactagcagccacagccttctctctggggttggggttcactggttagccg

SEQ ID NO: 2174 - DNA, 50 bp, Mus musculus
cgggtgatgatcacgtctatgaagttagctgcagtaatggtagtcttccc

SEQ ID NO: 2175 - DNA, 50 bp, Mus musculus
tatgatgaattatggaaatgactgggacatgtacttggttccctcctacg

SEQ ID NO: 2176 - DNA, 50 bp, Mus musculus
gatccacaagctcttgccaaggctgtacagattcaccaagataccttacg

SEQ ID NO: 2177 - DNA, 50 bp, Mus musculus
cgttggccaagcacaattgtgttattggagataatgaattcaatccccat

SEQ ID NO: 2178 - DNA, 50 bp, Mus musculus
actcagcattttgaaagatactatttttcacaaatcacaaatggctttcg

SEQ ID NO: 2179 - DNA, 50 bp, Mus musculus
ttcatggccatgtagtgacccagcttggcgctctggatggtgaccacacg

SEQ ID NO: 2180 - DNA, 50 bp, Mus musculus
tttcacttttaatcaagcttcctgttgtaagagctcagcagacagtgacg

SEQ ID NO: 2181 - DNA, 50 bp, Mus musculus
cgagcccactgttggaatagttgctgatgggggactgttggctgctgcat

SEQ ID NO: 2182 - DNA, 50 bp, Mus musculus
ttcctgacaaccttctacagttattgacattacaaataccagcaacaacg

SEQ ID NO: 2183 - DNA, 50 bp, Mus musculus
cggacctaagaccgggaacacaaaacagagaaaaaaggacaattttgtgg

SEQ ID NO: 2184 - DNA, 50 bp, Mus musculus
cgccagctgcaggtccaggatgtagtcgataacgtgctgcaggatctcca

SEQ ID NO: 2185 - DNA, 50 bp, Mus musculus
cgatgatcttcatctgctggtcggaagggctgtggaattggaatggattt

SEQ ID NO: 2186 - DNA, 50 bp, Mus musculus
ttctctgggttcctcggcccaccattcttgttcagtcttaccagaaaccg

SEQ ID NO: 2187 - DNA, 50 bp, Mus musculus
cgtgcagaccctggtgcatctcaagttccccacaaaggtgggcaaggcct

SEQ ID NO: 2188 - DNA, 50 bp, Mus musculus
attggaccgcagcgctgagagcttttgtgtttaatgaccttcagctaccg

SEQ ID NO: 2189 - DNA, 50 bp, Mus musculus
gttccactccagtgccctccccaataaaacttttcatatccttataaacg

SEQ ID NO: 2190 - DNA, 50 bp, Mus musculus
cgggattataccgctctgtgcaggcccacaggaatcaaagtcggagagaa

SEQ ID NO: 2191 - DNA, 50 bp, Mus musculus
ggacgtcccaaagacagatatactcatatgtaatctgcaaggcacattcg

SEQ ID NO: 2192 - DNA, 50 bp, Mus musculus
caagtatttaaaacctctagaaacccatgatttgacaatcaatgattgcg

SEQ ID NO: 2193 - DNA, 50 bp, Mus musculus
cggctgcctttaaatagtccgatctatcagaggggcacacgctgcccata

SEQ ID NO: 2194 - DNA, 50 bp, Mus musculus
cggcccttggagacttcccgcttcaccaagctgctgctcaagctgccgga

SEQ ID NO: 2195 - DNA, 50 bp, Mus musculus
cgagaccacttgtaaaagcaataaagcacaaggagtgactgcagtaagtg

SEQ ID NO: 2196 - DNA, 50 bp, Mus musculus
cgccaccttttaatcttttgtaagagtgaaaaggcagaaaaggaacgctc

SEQ ID NO: 2197 - DNA, 50 bp, Mus musculus
cgctacagcactggattagctggaaacctcctgggagacctacattacac

SEQ ID NO: 2198 - DNA, 50 bp, Mus musculus
tgatctgcttcctggagaactccttgaactcggtgtaggggttgaagacg

SEQ ID NO: 2199 - DNA, 50 bp, Mus musculus
cgcattagcggacactctataatagtggcatttattaagagacctgttct

SEQ ID NO: 2200 - DNA, 50 bp, Mus musculus
cggggatgatctgggttccgggggaagtggaattattttttaccagcgaa

SEQ ID NO: 2201 - DNA, 50 bp, Mus musculus
tctgtacagtgtcgacagtctgtaatgcctttttagcatgaatgacaacg

SEQ ID NO: 2202 - DNA, 50 bp, Mus musculus
cggatgaccaaagacctttcttatgccggaagcaaaaaccaaaacttttt

SEQ ID NO: 2203 - DNA, 50 bp, Mus musculus
ggtcaggagaatgtaccatttgtaaacacccctttccttttttattcacg

SEQ ID NO: 2204 - DNA, 50 bp, Mus musculus
tggaagtgatgtgcaaggcaagagataaccaggtagaactcagcgattcg

SEQ ID NO: 2205 - DNA, 50 bp, Mus musculus
ctatccggaatattttggattctttgtcctcccatcggatgaagttttcg

SEQ ID NO: 2206 - DNA, 50 bp, Mus musculus
cgtggccaggaacctccgcattcacatgaccagtgagaagcacatgcata

SEQ ID NO: 2207 - DNA, 50 bp, Mus musculus
cggctctatgacgatgccattggtagaattatttagttctctggagacaa

SEQ ID NO: 2208 - DNA, 50 bp, Mus musculus
cgtcccattcagcttctcccgggctcggtcagcatctgagctagtttcaa

SEQ ID NO: 2209 - DNA, 50 bp, Mus musculus
gcatttgtaacgaatttccgttcgagtttgtattttaggcgccattttcg

SEQ ID NO: 2210 - DNA, 50 bp, Mus musculus
ctcgttctctcctccgttgcagattgaagtagtcaatactttcaagagcg

SEQ ID NO: 2211 - DNA, 50 bp, Mus musculus
cgccctaaatcactgaggcggtcagagaacaaactaggtttagagtcatc

SEQ ID NO: 2212 - DNA, 50 bp, Mus musculus
gactctgtgacacgtggaataaaatcacgctcccataatgggatcattcg

SEQ ID NO: 2213 - DNA, 50 bp, Mus musculus
aatctgaatcttttttctccccatagtccccgtttttcttctctctctcg

SEQ ID NO: 2214 - DNA, 50 bp, Mus musculus
acaggtggcttccagaccttcaacttcaaaacagtccgtcaaggtcagcg

SEQ ID NO: 2215 - DNA, 50 bp, Mus musculus
tcaaaagagtgcataaatgaaacaatgtccccaacggggtcagtgacccg

SEQ ID NO: 2216 - DNA, 50 bp, Mus musculus
gctgtgctggtgatcacaagaaacaacagcaatctgttgaagatcagacg

SEQ ID NO: 2217 - DNA, 50 bp, Mus musculus
ttagttgcgttgagtcatcaggcaaagtgagtccttttgggttgtcctcg

SEQ ID NO: 2218 - DNA, 50 bp, Mus musculus
cggtgatacattttgtacaataattagttatttgattacttttgttttag

SEQ ID NO: 2219 - DNA, 50 bp, Mus musculus
gctatttttgatgcaatgttcttaaaggcaatagatgtcccagatattcg

SEQ ID NO: 2220 - DNA, 50 bp, Unknown
  Description of Unknown: Rat/Human/Universal CpG sequence
accttgattcactcttcgtcgttggctaggttttggatttattactttcg

SEQ ID NO: 2221 - DNA, 50 bp, Unknown
  Description of Unknown: Rat/Human/Universal CpG sequence
cgggctggccaggcagctgcaacctgcgctcaggcagctcttaaagacat

SEQ ID NO: 2222 - DNA, 50 bp, Unknown
  Description of Unknown: Rat/Human/Universal CpG sequence
agcaattaaacagtttgattaaatgagccatcataacaatgatgtctgcg

SEQ ID NO: 2223 - DNA, 50 bp, Unknown
  Description of Unknown: Rat/Human/Universal CpG sequence
cggccttgtgtcagcaggtcatggtccctagagactacctagttgtagtg

SEQ ID NO: 2224 - DNA, 50 bp, Unknown
  Description of Unknown: Rat/Human/Universal CpG sequence
cggtcgcaaatggtttgactaaacgtaggatgggacttaagttgaacggc

SEQ ID NO: 2225 - DNA, 50 bp, Unknown
  Description of Unknown: Rat/Human/Universal CpG sequence
cgtcaagtttactcacgagtttactcagcacaaggagggggaagaggcca

SEQ ID NO: 2226 - DNA, 50 bp, Unknown
  Description of Unknown: Rat/Human/Universal CpG sequence
cataccttataaactcttctccaattctttttgttgtcttttaacattcg

SEQ ID NO: 2227 - DNA, 50 bp, Unknown
  Description of Unknown: Rat/Human/Universal CpG sequence
cgtgtggccttaaacttgcagcaaattgcaaagaaatggctcaaaagctt

SEQ ID NO: 2228 - DNA, 50 bp, Unknown
  Description of Unknown: Rat/Human/Universal CpG sequence
gtgcgtcttcacggtggtcatgacctacagtatcacctgccccatcatcg

SEQ ID NO: 2229 - DNA, 50 bp, Unknown
  Description of Unknown: Rat/Human/Universal CpG sequence
cgtggccagccatctcctattgaacctggaggactggctggtgaagtact

SEQ ID NO: 2230 - DNA, 50 bp, Unknown
  Description of Unknown: Rat/Human/Universal CpG sequence
actccctgcagaagacgtactcggtgtagctggtccagatcttgtcctcg

SEQ ID NO: 2231 - DNA, 50 bp, Unknown
  Description of Unknown: Rat/Human/Universal CpG sequence
attccctcactcgacttttccctaatgagttcgctaacttttataatgcg

SEQ ID NO: 2232 - DNA, 50 bp, Unknown
  Description of Unknown: Rat/Human/Universal CpG sequence
cggtgtcccaaactaggtcagcagcgctcgtttcctgtgggtcagctagc

SEQ ID NO: 2233 - DNA, 50 bp, Unknown
  Description of Unknown: Rat/Human/Universal CpG sequence
tctccttcaactagacgcttattcatgtcgccttaatgagaaacaaaacg

SEQ ID NO: 2234 - DNA, 50 bp, Unknown
  Description of Unknown: Rat/Human/Universal CpG sequence
aggatcttcagtgagagacattattcttggaatatccaattaattccacg

SEQ ID NO: 2235 - DNA, 50 bp, Unknown
  Description of Unknown: Rat/Human/Universal CpG sequence
cggagaacctggagatcttgttggtggggccaaccagggtcacagtttct

SEQ ID NO: 2236 - DNA, 50 bp, Unknown
  Description of Unknown: Rat/Human/Universal CpG sequence
ggttggccgtttgctgcgtctaggggtgttctatgtagcgcagcagttcg

SEQ ID NO: 2237 - DNA, 50 bp, Unknown
  Description of Unknown: Rat/Human/Universal CpG sequence
ctaggagcctaggcggcactgttcctttgtcccctcagctcatcttcacg

SEQ ID NO: 2238 - DNA, 50 bp, Unknown
  Description of Unknown: Rat/Human/Universal CpG sequence
atgggcgggcaggacaacacggcatggagcagctccacatggacaccccg

SEQ ID NO: 2239 - DNA, 50 bp, Unknown
  Description of Unknown: Rat/Human/Universal CpG sequence
gccctgagcttttctgggtgtgtgtgacaaaggcttaatctgtccggacg

SEQ ID NO: 2240 - DNA, 50 bp, Unknown
  Description of Unknown: Rat/Human/Universal CpG sequence
ctccacggggcttgttttggatccccctgcagtgaaacaggtcctgtacg

SEQ ID NO: 2241 - DNA, 50 bp, Unknown
  Description of Unknown: Rat/Human/Universal CpG sequence
gagcggcaggggcatgtggatactggctctctccttgttccagagcttcg

SEQ ID NO: 2242 - DNA, 50 bp, Unknown
  Description of Unknown: Rat/Human/Universal CpG sequence
cgttaatgtaatcagcagtgtgcgaaatgactgcgcggaaaatagcatca

SEQ ID NO: 2243 - DNA, 50 bp, Unknown
  Description of Unknown: Rat/Human/Universal CpG sequence
tgatgctcagttgtcagactacccttctttggactaccaaggcctctacg

SEQ ID NO: 2244 - DNA, 50 bp, Unknown
  Description of Unknown: Rat/Human/Universal CpG sequence
caggcggcctcttttgtttatctgacagctaaatatcaaggcaatcaccg

SEQ ID NO: 2245 - DNA, 50 bp, Unknown
  Description of Unknown: Rat/Human/Universal CpG sequence
ggcagcaagccctacaagtgtgacgagtgcagctacaccagtgtctaccg

SEQ ID NO: 2246 - DNA, 50 bp, Unknown
  Description of Unknown: Rat/Human/Universal CpG sequence
cgtgttgcgctttcatccaattttctgatgtgttttggtaatgatgttga

SEQ ID NO: 2247 - DNA, 50 bp, Unknown
  Description of Unknown: Rat/Human/Universal CpG sequence
cgctccccctctaatgtgtgatctggaagctctataaagcctgatgtaat

SEQ ID NO: 2248 - DNA, 50 bp, Unknown
  Description of Unknown: Rat/Human/Universal CpG sequence
cgctgcgcagctgagagcctcggcttaatcttatgcaccattaagcactc

SEQ ID NO: 2249 - DNA, 50 bp, Unknown
  Description of Unknown: Rat/Human/Universal CpG sequence
gggctcattgatggccttactaagttttttacaccatcacctgatggtcg

SEQ ID NO: 2250 - DNA, 50 bp, Unknown
  Description of Unknown: Rat/Human/Universal CpG sequence
cgagtgccttgagcctgagcaatgtagcaggcgtcttctacattctggtt

SEQ ID NO: 2251 - DNA, 50 bp, Unknown
  Description of Unknown: Rat/Human/Universal CpG sequence
tttttctttctaagctgagcacgtagtctgttcagagcttgtttcttccg

SEQ ID NO: 2252 - DNA, 50 bp, Unknown
  Description of Unknown: Rat/Human/Universal CpG sequence
cggttgtcctgccataagtagtagaaagtgcccaggatccaggctacggt

SEQ ID NO: 2253 - DNA, 50 bp, Unknown
  Description of Unknown: Rat/Human/Universal CpG sequence
aggtctctctgtttggctgggggtcctcctccactatctgagaatccacg

SEQ ID NO: 2254 - DNA, 50 bp, Unknown
  Description of Unknown: Rat/Human/Universal CpG sequence
cacaataagtcaaggtcataaaacagtaatgtcaggacggtcttggtgcg

SEQ ID NO: 2255 - DNA, 50 bp, Unknown
  Description of Unknown: Rat/Human/Universal CpG sequence
tgtgaaatggagctgtgtatattgaaatttctttctccaaaaacagagcg

SEQ ID NO: 2256 - DNA, 50 bp, Unknown
  Description of Unknown: Rat/Human/Universal CpG sequence
cgatcaatggctatcagcagttcttgtgagagggcagaataatttgatgg

SEQ ID NO: 2257 - DNA, 50 bp, Unknown
  Description of Unknown: Rat/Human/Universal CpG sequence
caaactggttgttaactgtgataacaactgatttcaaggggttattgccg

SEQ ID NO: 2258 - DNA, 50 bp, Unknown
  Description of Unknown: Rat/Human/Universal CpG sequence
cgcggaaggtctccggcgaggtctccattactaatagaagttttttgatg

SEQ ID NO: 2259 - DNA, 50 bp, Unknown
  Description of Unknown: Rat/Human/Universal CpG sequence
cggctgtgggtcacattcatgtgtttctccaggtaccagcggttgttgaa

SEQ ID NO: 2260 - DNA, 50 bp, Unknown
  Description of Unknown: Rat/Human CpG sequence
cgtctcatcgcaaagtaaataaattatgcctatcattttggcagcttaag

SEQ ID NO: 2261 - DNA, 50 bp, Unknown
  Description of Unknown: Rat/Human CpG sequence
tgcagcttcttgaggaactcaatctcatccatcagagactcaatcttgcg

SEQ ID NO: 2262 - DNA, 50 bp, Unknown
  Description of Unknown: Rat/Human CpG sequence
gcttgttacctggtcatcagttcgagacatctcagcaatgggcactaccg

SEQ ID NO: 2263 - DNA, 50 bp, Unknown
  Description of Unknown: Rat/Human CpG sequence
cgcgggaatggcaaatatactatttgtctaatggctcggcaattaaattc

SEQ ID NO: 2264 - DNA, 50 bp, Unknown
  Description of Unknown: Rat/Human CpG sequence
atggctggggctgcctctgtacaatgggataaaattcaagttcaagtgcg

SEQ ID NO: 2265 - DNA, 50 bp, Unknown
  Description of Unknown: Rat/Human CpG sequence
gacgggtccagcatccagtagttgcccttgcccgggtcgtcgtagtggcg

SEQ ID NO: 2266 - DNA, 50 bp, Unknown
  Description of Unknown: Rat/Human CpG sequence
ctggctcccgattcgggatccagtttcagagagcgagagattggggagcg

SEQ ID NO: 2267 - DNA, 50 bp, Unknown
  Description of Unknown: Rat/Human CpG sequence
caggatggatggcgggaccgacagccgcggaatccctaataaaggccgcg

SEQ ID NO: 2268 - DNA, 50 bp, Unknown
  Description of Unknown: Rat/Human CpG sequence
cgctgtcgtctctgttcatatatatttagtatttatttacaaggctgggt

SEQ ID NO: 2269 - DNA, 50 bp, Unknown
  Description of Unknown: Rat/Human CpG sequence
tgtcattcatcaaaaagtagcgcccgctcgtcattaaggtacgaatgacg

SEQ ID NO: 2270 - DNA, 50 bp, Unknown
  Description of Unknown: Rat/Human CpG sequence
tcacagctcggagtgaatggtgtttctgggataccacagcaaccttgacg

SEQ ID NO: 2271 - DNA, 50 bp, Unknown
  Description of Unknown: Rat/Human CpG sequence
cgccaacagccttaaaacttgccacagttgctgccagtatggacagagtg

SEQ ID NO: 2272 - DNA, 50 bp, Unknown
  Description of Unknown: Rat/Human CpG sequence
taccttccttctccttccctacaattaggacaggaacaggcaactcttcg

SEQ ID NO: 2273 - DNA, 50 bp, Unknown
  Description of Unknown: Rat/Human CpG sequence
cgcccctgctcatccatgctagcctggtattgcagctgcagctcccgcag

SEQ ID NO: 2274 - DNA, 50 bp, Unknown
  Description of Unknown: Rat/Human CpG sequence
ccggttcgacaggtaacaaataggtgggttgtcaccgttatttcccaacg

SEQ ID NO: 2275 - DNA, 50 bp, Unknown
  Description of Unknown: Rat/Human CpG sequence
cgccaggcagtgaaacttaatagcaggacaagaaaacggtttaataaaga

SEQ ID NO: 2276 - DNA, 50 bp, Unknown
  Description of Unknown: Rat/Human CpG sequence
cgctgtagacagcgctggaaataatcagattaaggccaattatgcgtgag

SEQ ID NO: 2277 - DNA, 50 bp, Unknown
  Description of Unknown: Rat/Human CpG sequence
cgaatttagcaaatcagatcatggtttaaatgcactatttaaagcagtcc

SEQ ID NO: 2278 - DNA, 50 bp, Unknown
  Description of Unknown: Rat/Human CpG sequence
gctgctccaggagccatggctaatcatcttataagcaatgctctgcttcg

SEQ ID NO: 2279 - DNA, 50 bp, Unknown
  Description of Unknown: Rat/Human CpG sequence
tctctcttaagtgccatcgaggggcgccgggaattgcagccagtaaatcg

SEQ ID NO: 2280 - DNA, 50 bp, Unknown
  Description of Unknown: Rat/Human CpG sequence
cgccagcaataagaccaaccgctttgctattgtccaagtggaaagagcca

SEQ ID NO: 2281 - DNA, 50 bp, Unknown
  Description of Unknown: Rat/Human CpG sequence
tgtcaaatcccccttaattaccagagattttatagcagcttcattatacg

SEQ ID NO: 2282 - DNA, 50 bp, Unknown
  Description of Unknown: Rat/Human CpG sequence
cagaccattttcattcaggaaaatcaatagacaacttactgtgatgtacg

SEQ ID NO: 2283 - DNA, 50 bp, Unknown
  Description of Unknown: Rat/Human CpG sequence
ctaattatctcgggcaagatgtaggcttctattgtcttgttgctttagcg

SEQ ID NO: 2284 - DNA, 50 bp, Unknown
  Description of Unknown: Rat/Human CpG sequence
cgagaaattttatggccataaggagcgtactctaatggtgatttttgagg

SEQ ID NO: 2285 - DNA, 50 bp, Unknown
  Description of Unknown: Rat/Human CpG sequence
cgacataaagcgtatcaaatatttatttatctgggcaacaaaggactatg

SEQ ID NO: 2286 - DNA, 50 bp, Unknown
  Description of Unknown: Rat/Human CpG sequence
gatttgtggataagcctgaagcaaagtcaatgctcggtgtcaatcccacg

SEQ ID NO: 2287 - DNA, 50 bp, Unknown
  Description of Unknown: Rat/Human CpG sequence
cggggacctaattccaggcccaggatcgaattttctggcaacaaagggaa

SEQ ID NO: 2288 - DNA, 50 bp, Unknown
  Description of Unknown: Rat/Human CpG sequence
cagccaagtagacttaaagtagtcacttatttcccaaaactggtttgtcg

SEQ ID NO: 2289 - DNA, 50 bp, Unknown
  Description of Unknown: Rat/Human CpG sequence
catcacctttaaccgctacagccatgatttcaacttccacatcaactacg

SEQ ID NO: 2290 - DNA, 50 bp, Unknown
  Description of Unknown: Rat/Human CpG sequence
acaggagcacctccagcacgcagcaggggaacttcatcaaagtcaggacg

SEQ ID NO: 2291 - DNA, 50 bp, Unknown
  Description of Unknown: Rat/Human CpG sequence
tcaaaatgcaggttggagttttgacattcctgcaggctctgaacgcctcg

SEQ ID NO: 2292 - DNA, 50 bp, Unknown
  Description of Unknown: Rat/Human CpG sequence
cgcctgggaactgcagcaaatgggagaagtatgcatggatttcacaggta

SEQ ID NO: 2293 - DNA, 50 bp, Unknown
  Description of Unknown: Rat/Human CpG sequence
cgcctacagtttcgtttccattcacgacgcgttcactgatcgccacgagt

SEQ ID NO: 2294 - DNA, 50 bp, Unknown
  Description of Unknown: Rat/Human CpG sequence
ttctgttgcagggactaggccctggccaggcccccgaggtggcccccacg

SEQ ID NO: 2295 - DNA, 50 bp, Unknown
  Description of Unknown: Rat/Human CpG sequence
cgcatcatggaaaagcagttgctcgaagaactcgagcgacagagacaagc

SEQ ID NO: 2296 - DNA, 50 bp, Unknown
  Description of Unknown: Rat/Human CpG sequence
cctaactcaatcggcttgttgtgatgcgtatccccgtagatgccagcacg

SEQ ID NO: 2297 - DNA, 50 bp, Unknown
  Description of Unknown: Rat/Human CpG sequence
cgcacaaacctgaccagcagcgcagaggagccgtggaaaaaccaactatc

SEQ ID NO: 2298 - DNA, 50 bp, Unknown
  Description of Unknown: Rat/Human CpG sequence
cgaggtgtaatcattctggttgagagagaaaaagattaagagggtgcaac

SEQ ID NO: 2299 - DNA, 50 bp, Unknown
  Description of Unknown: Rat/Human CpG sequence
cgtgagaataatgaatgtggaaatacaactaaaaacatggcactcaaaac

SEQ ID NO: 2300 - DNA, 50 bp, Unknown
  Description of Unknown: Rat/Human CpG sequence
gacagcttcaacttcttcaccagagaatctcttgcggctattgaaagacg

SEQ ID NO: 2301 - DNA, 50 bp, Unknown
  Description of Unknown: Rat/Human CpG sequence
ctagccagcagcagagacagatggcagagttattagatgtgcatcatacg

SEQ ID NO: 2302 - DNA, 50 bp, Unknown
  Description of Unknown: Rat/Human CpG sequence
cgtgtccagaggtctcttgtggaacatttctacagctgtctccttcaact

SEQ ID NO: 2303 - DNA, 50 bp, Unknown
  Description of Unknown: Rat/Human CpG sequence
ttatcattcggaagctttaattctattgaaatggcagctgctcagctccg

SEQ ID NO: 2304 - DNA, 50 bp, Unknown
  Description of Unknown: Rat/Human CpG sequence
ttcccactgtcttcatctgtggcactaatagttgttaagtataacccacg

SEQ ID NO: 2305 - DNA, 50 bp, Unknown
  Description of Unknown: Rat/Human CpG sequence
cggaggaaacgaggaaaacttgggaatttcccgtgctcctgaaatatctc

SEQ ID NO: 2306 - DNA, 50 bp, Unknown
  Description of Unknown: Rat/Human CpG sequence
ccataagccgtcacttattcatcttaatttcaacaaaattaaagtagtcg

SEQ ID NO: 2307 - DNA, 50 bp, Unknown
  Description of Unknown: Rat/Human CpG sequence
cgaactcccagtttttgttaggggcataatcccattctacttcttcagcg

SEQ ID NO: 2308 - DNA, 50 bp, Unknown
  Description of Unknown: Rat/Human CpG sequence
cctccgggaggtttcgtttttccattgaagtccccctgatttactgtacg

SEQ ID NO: 2309 - DNA, 50 bp, Unknown
  Description of Unknown: Rat/Human CpG sequence
cgctgcaggatgatagtgacttctgaaattatcacaattatcattccatt

SEQ ID NO: 2310 - DNA, 50 bp, Unknown
  Description of Unknown: Rat/Human CpG sequence
cggagctttggagagatgaagtttaaacagtgtcctacagagaacatggc

SEQ ID NO: 2311 - DNA, 50 bp, Unknown
  Description of Unknown: Rat/Human CpG sequence
gcaaattaatacatatatcaattttgtcagaaacatgcttagttcaatcg

SEQ ID NO: 2312 - DNA, 50 bp, Unknown
  Description of Unknown: Rat/Human CpG sequence
atggttacctgttcagcaccgattcaaactgccgttctttattgacagcg

SEQ ID NO: 2313 - DNA, 50 bp, Unknown
  Description of Unknown: Rat/Human CpG sequence
cgcccgggctgcctgttccaatattagatataaacaagtaaactgtgtaa

SEQ ID NO: 2314 - DNA, 50 bp, Unknown
  Description of Unknown: Rat/Human CpG sequence
cggacagagtccagatggctgttctaccgttatgtttcccaagataatgg

SEQ ID NO: 2315 - DNA, 50 bp, Unknown
  Description of Unknown: Rat/Human CpG sequence
cgcacctgctgctccagccccaggatgacctgcacggcctgctgcaggat

SEQ ID NO: 2316 - DNA, 50 bp, Unknown
  Description of Unknown: Rat/Human CpG sequence
cgtgctgtcgagagaaaggtggatcccaacaacaggaaactacctaaatc

SEQ ID NO: 2317 - DNA, 50 bp, Unknown
  Description of Unknown: Rat/Human CpG sequence
cgcattgcgcagggtgcaccaccgcttggtctccctgcagctttaacagc

SEQ ID NO: 2318 - DNA, 50 bp, Unknown
  Description of Unknown: Rat/Human CpG sequence
cgcccaggtggctttcttaaagggaaagttgcatcagcctcccgaggctc

SEQ ID NO: 2319 - DNA, 50 bp, Unknown
  Description of Unknown: Rat/Human CpG sequence
aggagctgtgggtgctgatctggctgtactcgcagtctttcatgggcccg

SEQ ID NO: 2320 - DNA, 50 bp, Unknown
  Description of Unknown: Rat/Human CpG sequence
cggcccaccctacatttagcgcatcatgtgatccgggtaagtcatttgca

SEQ ID NO: 2321 - DNA, 50 bp, Unknown
  Description of Unknown: Rat/Human CpG sequence
ttgggtacccaagctggcttttgtactcttcggagcttccttgttcagcg

SEQ ID NO: 2322 - DNA, 50 bp, Unknown
  Description of Unknown: Rat/Human CpG sequence
cgtgagcccagatccggacgagcagttcacattccattacgaaattctac

SEQ ID NO: 2323 - DNA, 50 bp, Unknown
  Description of Unknown: Rat/Human CpG sequence
cgactcagcaaggtcactgttcagacttgactcgtgattggctgctgcgc

SEQ ID NO: 2324 - DNA, 50 bp, Unknown
  Description of Unknown: Rat/Human CpG sequence
cgagtgatttatgacttcagtcttggttcaccaagagttcacacggcttt

SEQ ID NO: 2325 - DNA, 50 bp, Unknown
  Description of Unknown: Rat/Human CpG sequence
ggaaatcatgcccatgaatatagtttccatcatttcacccttgatagacg

SEQ ID NO: 2326 - DNA, 50 bp, Unknown
  Description of Unknown: Rat/Human CpG sequence
cgagatgcaataatatttgtgaacatgttaatataaaaaatgaatttaat

SEQ ID NO: 2327 - DNA, 50 bp, Unknown
  Description of Unknown: Rat/Human CpG sequence
cgggatgctcggactgcacagagccaccatcaggcagcaggtgaccagga

SEQ ID NO: 2328 - DNA, 50 bp, Unknown
  Description of Unknown: Rat/Human CpG sequence
tcaactaagaaaatacagagtgaaccatatggcctgggtggctcgagtcg

SEQ ID NO: 2329 - DNA, 50 bp, Unknown
  Description of Unknown: Rat/Human CpG sequence
ttcacaaccccctgaaagcgtaagtaagactaaaaaatgtacatattccg

SEQ ID NO: 2330 - DNA, 50 bp, Unknown
  Description of Unknown: Rat/Human CpG sequence
ttaaaagaatctttatatttcattaagcaagcagatcggcggatctcccg

SEQ ID NO: 2331 - DNA, 50 bp, Unknown
  Description of Unknown: Rat/Human CpG sequence
tggaagagattctgcattactacacctcagtgcctgcctggttcccttcg

SEQ ID NO: 2332 - DNA, 50 bp, Unknown
  Description of Unknown: Rat/Human CpG sequence
gttcgcactgctgtaaggctttttgcaaactcagaggctgctgctcctcg

SEQ ID NO: 2333 - DNA, 50 bp, Unknown
  Description of Unknown: Rat/Human CpG sequence
cgcggcagaccacccacgccgagggccatggaactgcttaatagaaacag

SEQ ID NO: 2334 - DNA, 50 bp, Unknown
  Description of Unknown: Rat/Human CpG sequence
aattaaaaattcaaaccttgtgtatatttgaaagcatgaatcttagctcg

SEQ ID NO: 2335 - DNA, 50 bp, Unknown
  Description of Unknown: Rat/Human CpG sequence
cgatttaggttttaattccggggcttttggagcctgtcagccctgatgta

SEQ ID NO: 2336 - DNA, 50 bp, Unknown
  Description of Unknown: Rat/Human CpG sequence
attaggccgcaaatcgcgctgagcctccctaagtgacagcgagagaatcg

SEQ ID NO: 2337 - DNA, 50 bp, Unknown
  Description of Unknown: Rat/Human CpG sequence
cgggcagcggccgcagcagctccttgattcaatagatgagatggaagaag

SEQ ID NO: 2338 - DNA, 50 bp, Unknown
  Description of Unknown: Rat/Human CpG sequence
ttacttgctttaacttcatacggtccacagtgaaagagttcattcagtcg

SEQ ID NO: 2339 - DNA, 50 bp, Unknown
  Description of Unknown: Rat/Human CpG sequence
atgaccaaactgcacatgagccacggtaaactttaggacttcattttgcg

SEQ ID NO: 2340 - DNA, 50 bp, Unknown
  Description of Unknown: Rat/Human CpG sequence
cgggtgtctgacagccggacagcgggatctgcacagcaagtgaaattccc

SEQ ID NO: 2341 - DNA, 50 bp, Unknown
  Description of Unknown: Rat/Human CpG sequence
cgtgctcatacgagcaaagggcccgggccatatagtcccagtgtccagtt

SEQ ID NO: 2342 - DNA, 50 bp, Unknown
  Description of Unknown: Rat/Human CpG sequence
cgcgccacctatctttgtggggagggataattgaagcgccctgagcgtga

SEQ ID NO: 2343 - DNA, 50 bp, Unknown
  Description of Unknown: Rat/Human CpG sequence
cgcaccaataaaaataattgtgcaagcctaaatttggaagtgttcccagc

SEQ ID NO: 2344 - DNA, 50 bp, Unknown
  Description of Unknown: Rat/Human CpG sequence
cacaagcaaagaagcatgtcccatttaaatacacccacgcagccccagcg

SEQ ID NO: 2345 - DNA, 50 bp, Unknown
  Description of Unknown: Rat/Human CpG sequence
atttttttttaagctctgagctgtcaacgagacgtttcctaccgatctcg

SEQ ID NO: 2346 - DNA, 50 bp, Unknown
  Description of Unknown: Rat/Human CpG sequence
ttcttttctttcaacacaaaagttgggttgtgaattttccgaggtcgccg

SEQ ID NO: 2347 - DNA, 50 bp, Unknown
  Description of Unknown: Rat/Human CpG sequence
tttctgaggtttagtgagttcgattagccgcgtgctcagaatcaagttcg

SEQ ID NO: 2348 - DNA, 50 bp, Unknown
  Description of Unknown: Rat/Human CpG sequence
cgcggcgggctgagttttgaaaacttaggattctaaatgtataaattgtt

SEQ ID NO: 2349 - DNA, 50 bp, Unknown
  Description of Unknown: Rat/Human CpG sequence
ctcccatggacccttctaactttgtcaccatgatgggcatgggggtggcg

SEQ ID NO: 2350 - DNA, 50 bp, Unknown
  Description of Unknown: Rat/Human CpG sequence
agggctgctgcaggtgcgtctgcacgtgggactggcagcagggcgcctcg

SEQ ID NO: 2351 - DNA, 50 bp, Unknown
  Description of Unknown: Rat/Human CpG sequence
atccctctgaaggcctttaactccacctgtgactaacccattcataatcg

SEQ ID NO: 2352 - DNA, 50 bp, Unknown
  Description of Unknown: Rat/Human CpG sequence
cacgatgatgataattgtaattagaaagtgcctggcaatttcttatcacg

SEQ ID NO: 2353 - DNA, 50 bp, Unknown
  Description of Unknown: Rat/Human CpG sequence
gaaattgtcctttgattaaaaaagattcatcaccatttccagctctgtcg

SEQ ID NO: 2354 - DNA, 50 bp, Unknown
  Description of Unknown: Rat/Human CpG sequence
cgcaggacttccatgtctgaggggatcaagcagctcttgaaagatatgtt

SEQ ID NO: 2355 - DNA, 50 bp, Unknown
  Description of Unknown: Rat/Human CpG sequence
atctgtagttcaattgtaaattagaatacacatccccccagggacacacg

SEQ ID NO: 2356 - DNA, 50 bp, Unknown
  Description of Unknown: Rat/Human CpG sequence
cttttcaatgtataaaatggaatattcttacctcaattcctctgcctacg

SEQ ID NO: 2357 - DNA, 50 bp, Unknown
  Description of Unknown: Rat/Human CpG sequence
cgcgcggccgagccccacgcagccgcacagacgtagtccacaaccatttc

SEQ ID NO: 2358 - DNA, 50 bp, Unknown
  Description of Unknown: Rat/Human CpG sequence
gtgggcaattaggcagaactttgtttgcactgcctcggaaaatgaaaccg

SEQ ID NO: 2359 - DNA, 50 bp, Unknown
  Description of Unknown: Rat/Human CpG sequence
cggcttactgaacattccaaatgctggtaccatgtaattggacataatag

SEQ ID NO: 2360 - DNA, 50 bp, Unknown
  Description of Unknown: Rat/Human CpG sequence
actttggctgctcagttgcatttcacaggaacctagatatcgaatcctcg

SEQ ID NO: 2361 - DNA, 50 bp, Unknown
  Description of Unknown: Rat/Human CpG sequence
cggagggaagaaaaactaaattcacttgtgaggcgattttatggcagagc

SEQ ID NO: 2362 - DNA, 50 bp, Unknown
  Description of Unknown: Rat/Human CpG sequence
tcagcatcatacacctgacctggggccacagctggataaagaaagtcacg

SEQ ID NO: 2363 - DNA, 50 bp, Unknown
  Description of Unknown: Rat/Human CpG sequence
ttccttttaagattctccagaaggctgcaaggccagaaccacaaatatcg

SEQ ID NO: 2364 - DNA, 50 bp, Unknown
  Description of Unknown: Rat/Human CpG sequence
ttagttactttcccactttgaggttaaacaaaccagtgaatgggactccg

SEQ ID NO: 2365 - DNA, 50 bp, Unknown
  Description of Unknown: Rat/Human CpG sequence
cgatcggaatgccaataaaatcgattaaaggtttagtgttttacaaacaa

SEQ ID NO: 2366 - DNA, 50 bp, Unknown
  Description of Unknown: Rat/Human CpG sequence
cggcatgaacgcggtgcggacgtggatgcagggcgccggggtgctggacg

SEQ ID NO: 2367 - DNA, 50 bp, Unknown
  Description of Unknown: Rat/Human CpG sequence
atttagagtcatttaatctactcaatttgcacgttaattaaacagcatcg

SEQ ID NO: 2368 - DNA, 50 bp, Unknown
  Description of Unknown: Rat/Human CpG sequence
tgaggtaactataaaaccccgatttgtttacattccctcccccagaaccg

SEQ ID NO: 2369 - DNA, 50 bp, Unknown
  Description of Unknown: Rat/Human CpG sequence
ggaaggcgatggccatgttcatctccagcatctgcagcaggtccactgcg

SEQ ID NO: 2370 - DNA, 50 bp, Unknown
  Description of Unknown: Rat/Human CpG sequence
aaaccgttttccactcattacaacaacagtgctggatttattctaatgcg

SEQ ID NO: 2371 - DNA, 50 bp, Unknown
  Description of Unknown: Rat/Human CpG sequence
ataaagccaccataaaatgtgagacttctcctccttcctcacccaggacg

SEQ ID NO: 2372 - DNA, 50 bp, Unknown
  Description of Unknown: Rat/Human CpG sequence
aggccaagggcataaagcccaatctcgaaggcgcaaaggtgcaggttgcg

SEQ ID NO: 2373 - DNA, 50 bp, Unknown
  Description of Unknown: Rat/Human CpG sequence
cgccatcttactgactggtctggatatatgttcctggaagaatgagccct

SEQ ID NO: 2374 - DNA, 50 bp, Unknown
  Description of Unknown: Rat/Human CpG sequence
cggctgacagatgaccatatgacacccttcagacagtacagtatgtcact

SEQ ID NO: 2375 - DNA, 50 bp, Unknown
  Description of Unknown: Rat/Human CpG sequence
atgaaactattaaacccgggtggaggtcaggctggaggcgccccagagcg

SEQ ID NO: 2376 - DNA, 50 bp, Unknown
  Description of Unknown: Rat/Human CpG sequence
acccttctaactttgtcaccatgatgggcatgggggtggcgggcatgccg

SEQ ID NO: 2377 - DNA, 50 bp, Unknown
  Description of Unknown: Rat/Human CpG sequence
cggatgaagaaacccagggccatgctcctattaatacaagaatttgtatt

SEQ ID NO: 2378 - DNA, 50 bp, Unknown
  Description of Unknown: Rat/Human CpG sequence
catctaccacgtcggggactggctacaagagcgatgtacaagccaaatcg

SEQ ID NO: 2379 - DNA, 50 bp, Unknown
  Description of Unknown: Rat/Human CpG sequence
cgcccagtacagctcggccagcaccccccagtacccgacagcacaccccc

SEQ ID NO: 2380 - DNA, 50 bp, Unknown
  Description of Unknown: Rat/Human CpG sequence
atcacgtttcgttatctttagtgggaatctgcaacgtgacaccggatccg

SEQ ID NO: 2381 - DNA, 50 bp, Unknown
  Description of Unknown: Rat/Human CpG sequence
tggccgccagcccgtaggtttcctgagtttgaagttgggcgtgcctgccg

SEQ ID NO: 2382 - DNA, 50 bp, Unknown
  Description of Unknown: Rat/Human CpG sequence
tcagttaactggtggtagtagcgttctattagatgctttgcagctgctcg

SEQ ID NO: 2383 - DNA, 50 bp, Unknown
  Description of Unknown: Rat/Human CpG sequence
cgggcgcaagtcggggaacaagcctccgtccaaaacatgtctgaaggagg

SEQ ID NO: 2384 - DNA, 50 bp, Unknown
  Description of Unknown: Rat/Human CpG sequence
cggtgccaagattgctttaaaaaattcccttggccccagttcaaacagga

SEQ ID NO: 2385 - DNA, 50 bp, Unknown
  Description of Unknown: Rat/Human CpG sequence
cgcagaatacactttgggaaacgctctaaggaaacagaaaataaaatgta

SEQ ID NO: 2386 - DNA, 50 bp, Unknown
  Description of Unknown: Rat/Human CpG sequence
ttttcatgtatccttgataactgtttcataatgagctatgcgtcttgacg

SEQ ID NO: 2387 - DNA, 50 bp, Unknown
  Description of Unknown: Rat/Human CpG sequence
cgcttatggtggcctgggctcgaatccatgttatggaggggttttgcctc

SEQ ID NO: 2388 - DNA, 50 bp, Unknown
  Description of Unknown: Rat/Human CpG sequence
tgatgttgcctgcgtccagtgcggcagccctcttgtcaaagcttatgacg

SEQ ID NO: 2389 - DNA, 50 bp, Unknown
  Description of Unknown: Rat/Human CpG sequence
cggggtgctgagtgcgcaattgcctcaaagaaaagtagacaggagacaag

SEQ ID NO: 2390 - DNA, 50 bp, Unknown
  Description of Unknown: Rat/Human CpG sequence
cgtatttcatgtcattatgttggataatataacaaatgatgcaatcagag

SEQ ID NO: 2391 - DNA, 50 bp, Unknown
  Description of Unknown: Rat/Human CpG sequence
agggcatcagtaatctttgctcaagggcacggctaacagacagatagacg

SEQ ID NO: 2392 - DNA, 50 bp, Unknown
  Description of Unknown: Rat/Human CpG sequence
cgggccaggtgggcctctgacacacagcaggaattttccactggcgcatc

SEQ ID NO: 2393 - DNA, 50 bp, Unknown
  Description of Unknown: Rat/Human CpG sequence
cggccattatgggccaaatgattcattttaatttggcaatttcaccggag

SEQ ID NO: 2394 - DNA, 50 bp, Unknown
  Description of Unknown: Rat/Human CpG sequence
cgctggtgactcggggagccgcaaacttcaatttaaatttacagtgctgc

SEQ ID NO: 2395 - DNA, 50 bp, Unknown
  Description of Unknown: Rat/Human CpG sequence
tcacagctgctccagaggttcctccagtcaaaccctttctggaaacgacg

SEQ ID NO: 2396 - DNA, 50 bp, Unknown
  Description of Unknown: Rat/Human CpG sequence
caaggagaatatgacagccacctcccttggcccttccagggtacaatacg

SEQ ID NO: 2397 - DNA, 50 bp, Unknown
  Description of Unknown: Rat/Human CpG sequence
ttctgaatgctatttaaacattggcagggggcctcattaaagatgaatcg

SEQ ID NO: 2398 - DNA, 50 bp, Unknown
  Description of Unknown: Rat/Human CpG sequence
cggtaattacaagacagaaaattaactagaactcttattaaggctttgtt

SEQ ID NO: 2399 - DNA, 50 bp, Unknown
  Description of Unknown: Rat/Human CpG sequence
aaatggaacttgtgtcagcaaagaactgattttcatacagacttctttcg

SEQ ID NO: 2400 - DNA, 50 bp, Unknown
  Description of Unknown: Rat/Human CpG sequence
cggctcgatgctggacatacttgaccggggtcatcctagggaaaacacta

SEQ ID NO: 2401 - DNA, 50 bp, Unknown
  Description of Unknown: Rat/Human CpG sequence
ctggaggtgatggatgttttcctccggttctcagggctccacctctttcg

SEQ ID NO: 2402 - DNA, 50 bp, Unknown
  Description of Unknown: Rat/Human CpG sequence
cgctgcagtcgtaaggtttctctgcagtgtgaattctctggtgcacaata

SEQ ID NO: 2403 - DNA, 50 bp, Unknown
  Description of Unknown: Rat/Human CpG sequence
gtcctcctggaggggatctctggccaaggagtgtacggtgagtggaatcg

SEQ ID NO: 2404 - DNA, 50 bp, Unknown
  Description of Unknown: Rat/Human CpG sequence
cgggagccctgactagaaagagggttctggaaatgtggtgtgtttctcat

SEQ ID NO: 2405 - DNA, 50 bp, Unknown
  Description of Unknown: Rat/Human CpG sequence
cgcaccatggcaacatcaacccgtcaaagcaaatgaagggtagtaaaagt

SEQ ID NO: 2406 - DNA, 50 bp, Unknown
  Description of Unknown: Rat/Human CpG sequence
tttttatccaaatggctcaattaccgcaaagccccacagagaaaattacg

SEQ ID NO: 2407 - DNA, 50 bp, Unknown
  Description of Unknown: Rat/Human CpG sequence
cggtagtcgtggcgaccaagcaacccggcaacgcgagtcaacaacaacaa

SEQ ID NO: 2408 - DNA, 50 bp, Unknown
  Description of Unknown: Rat/Human CpG sequence
ttcacgatcagtatattctgagggtttctccggatttggaatggcatgcg

SEQ ID NO: 2409 - DNA, 50 bp, Unknown
  Description of Unknown: Rat/Human CpG sequence
cctcttgaacatttaccgtaaccctcaaaactcttcccagtctgctgacg

SEQ ID NO: 2410 - DNA, 50 bp, Unknown
  Description of Unknown: Rat/Human CpG sequence
cggtcgaccgctgtactaaaagggttctcttgagaatccaccagaagtct

SEQ ID NO: 2411 - DNA, 50 bp, Unknown
  Description of Unknown: Rat/Human CpG sequence
ggaagggctcgccgccgttgggctgctggtggttctgcagggtctgctcg

SEQ ID NO: 2412 - DNA, 50 bp, Unknown
  Description of Unknown: Rat/Human CpG sequence
cgcagtaaaaactaacccttgggttgaatctttacttacagaggtatttt

SEQ ID NO: 2413 - DNA, 50 bp, Unknown
  Description of Unknown: Rat/Human CpG sequence
cgcatcaccacctattttgacatgcacggggccgtttgttgtctgtcgaa

SEQ ID NO: 2414 - DNA, 50 bp, Unknown
  Description of Unknown: Rat/Human CpG sequence
tattttccaaaagctcggtctgaggcccctcagtcttgcttcctaacccg

SEQ ID NO: 2415 - DNA, 50 bp, Unknown
  Description of Unknown: Rat/Human CpG sequence
cgctgcaccatgaaggggaacctcaagtcgcacatccgtatcaagcacag

SEQ ID NO: 2416 - DNA, 50 bp, Unknown
  Description of Unknown: Rat/Human CpG sequence
cgctggtaaatctttattaattttaattggcggcacccatttataagaac

SEQ ID NO: 2417 - DNA, 50 bp, Unknown
  Description of Unknown: Rat/Human CpG sequence
tgttctgtcttactctgcgcctagcattggaaatgaaagtgacatttacg

SEQ ID NO: 2418 - DNA, 50 bp, Unknown
  Description of Unknown: Rat/Human CpG sequence
tgacactgtcaacactgccctggtggaagactccgaggggctggactgcg

SEQ ID NO: 2419 - DNA, 50 bp, Unknown
  Description of Unknown: Rat/Human CpG sequence
cggagtgtttatgtcaactacatattcccctagatacgaatttgtgacca

SEQ ID NO: 2420 - DNA, 50 bp, Unknown
  Description of Unknown: Rat/Human CpG sequence
cgggctctgtatttctggaacaatgagtatatcctaagcctcattgagga

SEQ ID NO: 2421 - DNA, 50 bp, Unknown
  Description of Unknown: Rat/Human CpG sequence
taaaaattcccttcatgagcatcgacgggtacaaattattttgtcaatcg

SEQ ID NO: 2422 - DNA, 50 bp, Unknown
  Description of Unknown: Rat/Human CpG sequence
cggcagctgcacatgtgggtttgtttataagaacaaggttagaaactcgc

SEQ ID NO: 2423 - DNA, 50 bp, Unknown
  Description of Unknown: Rat/Human CpG sequence
tttgtattctgcatggtacgtacaatagcagacaccatctgaggagaacg

SEQ ID NO: 2424 - DNA, 50 bp, Unknown
  Description of Unknown: Rat/Human CpG sequence
ccttcatgttcatggtgctggaggtggtggtgagccgggtgacctcgtcg

SEQ ID NO: 2425 - DNA, 50 bp, Unknown
  Description of Unknown: Rat/Human CpG sequence
cgttggcacttccactgtgtacttttactataaattgttgtagcatttat

SEQ ID NO: 2426 - DNA, 50 bp, Unknown
  Description of Unknown: Rat/Human CpG sequence
cggagctgacgctttatcaggcagtcggaaaaactttgaccaatcatttt

SEQ ID NO: 2427 - DNA, 50 bp, Unknown
  Description of Unknown: Rat/Human CpG sequence
cgggatattgcaccacgctcgcctcttgctgagccccataaagggactgt

SEQ ID NO: 2428 - DNA, 50 bp, Unknown
  Description of Unknown: Rat/Human CpG sequence
cgtttctaataatagagcagatgaagtaatattgcaattgatgttcccgg

SEQ ID NO: 2429 - DNA, 50 bp, Unknown
  Description of Unknown: Rat/Human CpG sequence
gccattgctgctgcaagccttataactgccttcagtgcctggacaagacg

SEQ ID NO: 2430 - DNA, 50 bp, Unknown
  Description of Unknown: Rat/Human CpG sequence
cgtggctaaattgttaatcagggtaatttaatatagttttcaatatgcct

SEQ ID NO: 2431 - DNA, 50 bp, Unknown
  Description of Unknown: Rat/Human CpG sequence
cgggattccagcatcaccaccaggagctgtacccaccaccgcctccgcgc

SEQ ID NO: 2432 - DNA, 50 bp, Unknown
  Description of Unknown: Rat/Human CpG sequence
cggcatgcaaagggtgagttttatttccatagatttttaaaattgctgtt

SEQ ID NO: 2433 - DNA, 50 bp, Unknown
  Description of Unknown: Rat/Human CpG sequence
gattgtgtctgcctctacacatatctgtaattgattgcctaaaccctacg

SEQ ID NO: 2434 - DNA, 50 bp, Unknown
  Description of Unknown: Rat/Human CpG sequence
tggaccgcggatggtacgttccgcacgtgagctgggtgctggtctggccg

SEQ ID NO: 2435 - DNA, 50 bp, Unknown
  Description of Unknown: Rat/Human CpG sequence
cctgattggcttccatccatcgtgtagcgtcctgcaagtgactaaactcg

SEQ ID NO: 2436 - DNA, 50 bp, Unknown
  Description of Unknown: Rat/Human CpG sequence
cggaccaaggggaaatgaagaagccccaataaatcaccatgaagccacca

SEQ ID NO: 2437 - DNA, 50 bp, Unknown
  Description of Unknown: Rat/Human CpG sequence
gttaatatattagcacacagcattgatcaaatggctaatccaatcacacg

SEQ ID NO: 2438 - DNA, 50 bp, Unknown
  Description of Unknown: Rat/Human CpG sequence
ccagaaattaatggctatgagttcttttttgatcaactcaaactatgtcg

SEQ ID NO: 2439 - DNA, 50 bp, Unknown
  Description of Unknown: Rat/Human CpG sequence
cgcccaaaggggatactgcatccttaggaagaaatatgtcctcatttttc

SEQ ID NO: 2440 - DNA, 50 bp, Unknown
  Description of Unknown: Rat/Human CpG sequence
cgcctgggaaagccatcttgaactgaaaacggcaaagatagagagaggcc

SEQ ID NO: 2441 - DNA, 50 bp, Unknown
  Description of Unknown: Rat/Human CpG sequence
ggcaatttctggaactcttcccacgggaagttttccggggctgccttccg

SEQ ID NO: 2442 - DNA, 50 bp, Unknown
  Description of Unknown: Rat/Human CpG sequence
gctgggaattcaggttagtggaggccgaggatcaaagcgctcacctcacg

SEQ ID NO: 2443 - DNA, 50 bp, Unknown
  Description of Unknown: Rat/Human CpG sequence
taccgtccggcgttgcctgctggtggggttttttacatttgacgtaatcg

SEQ ID NO: 2444 - DNA, 50 bp, Unknown
  Description of Unknown: Rat/Human CpG sequence
ccctcaataaatgctttttgtaatcaacttaaagtataatacctaccacg

SEQ ID NO: 2445 - DNA, 50 bp, Unknown
  Description of Unknown: Rat/Human CpG sequence
attagtcgtctcacccaataattagttttttgtttccctgtctgttttcg

SEQ ID NO: 2446 - DNA, 50 bp, Unknown
  Description of Unknown: Rat/Human CpG sequence
cgccttgtaaaagcagattacagatgaaatggggcacatataaatgctaa

SEQ ID NO: 2447 - DNA, 50 bp, Unknown
  Description of Unknown: Rat/Human CpG sequence
cggcccaggttcgccagcagcccaagagcctcaaagtacgtgcaggccag

SEQ ID NO: 2448 - DNA, 50 bp, Unknown
  Description of Unknown: Rat/Human CpG sequence
atctccagaacaaagacaacattgacaaacccaacaaaaacaaacagccg

SEQ ID NO: 2449 - DNA, 50 bp, Unknown
  Description of Unknown: Rat/Human CpG sequence
cacaatgcattgggctgcagcaagtaggctcctcggcaggggtgggtgcg

SEQ ID NO: 2450 - DNA, 50 bp, Unknown
  Description of Unknown: Rat/Human CpG sequence
tcagttctgtcgaatagggcatcatcacctccctccagtctgcgtcatcg

SEQ ID NO: 2451 - DNA, 50 bp, Unknown
  Description of Unknown: Rat/Human CpG sequence
aattacccatcaagccatatcttttcagcccagaaatgcgcaataacacg

SEQ ID NO: 2452 - DNA, 50 bp, Unknown
  Description of Unknown: Rat/Human CpG sequence
cgtcattttgatgtcacgtttccatagcaacagagcaactgcataagcta

SEQ ID NO: 2453 - DNA, 50 bp, Unknown
  Description of Unknown: Rat/Human CpG sequence
tctcagtccttaattccagtcaattccagtcgaaaggctgataggcatcg

SEQ ID NO: 2454 - DNA, 50 bp, Unknown
  Description of Unknown: Rat/Human CpG sequence
cgtgtggctataaacccttccgttgtgaggtttgtaactactctaccact

SEQ ID NO: 2455 - DNA, 50 bp, Unknown
  Description of Unknown: Rat/Human CpG sequence
ggtgggtacagctcctggtggtgatgctggaatcccgattccctggtccg

SEQ ID NO: 2456 - DNA, 50 bp, Unknown
  Description of Unknown: Rat/Human CpG sequence
tggtcctcagtgacttcatgagccccctgtttaccttacatggtcacacg

SEQ ID NO: 2457 - DNA, 50 bp, Unknown
  Description of Unknown: Rat/Human CpG sequence
ggggaatattaatgattcaattttcaaccgggttccactccagggcctcg

SEQ ID NO: 2458 - DNA, 50 bp, Unknown
  Description of Unknown: Rat/Human CpG sequence
cggcatttcttaggcgagccagggtctgctcacagccatgccagaggggt

SEQ ID NO: 2459 - DNA, 50 bp, Unknown
  Description of Unknown: Rat/Human CpG sequence
ctatgatgattagtgtaacaaaatagatccagggccagtcccttcctacg

SEQ ID NO: 2460 - DNA, 50 bp, Unknown
  Description of Unknown: Rat/Human CpG sequence
cgcagatcagaatacaaaaggagaagcaagaaaatgacacccagccagga

SEQ ID NO: 2461 - DNA, 50 bp, Unknown
  Description of Unknown: Rat/Human CpG sequence
aagaatgtaaaatcaccggcatagataggtatatgggaaaacaacccacg

SEQ ID NO: 2462 - DNA, 50 bp, Unknown
  Description of Unknown: Rat/Human CpG sequence
gggtaaaccgacctggtccggcatgcattcatcatgtaattttccagacg

SEQ ID NO: 2463 - DNA, 50 bp, Unknown
  Description of Unknown: Rat/Human CpG sequence
gttgctgggtgactcagtgagctttgcatccggtctcattcataaatccg

SEQ ID NO: 2464 - DNA, 50 bp, Unknown
  Description of Unknown: Rat/Human CpG sequence
cgtctttcttactaataggattctgtctgcttcagcaggcagtaattgaa

SEQ ID NO: 2465 - DNA, 50 bp, Unknown
  Description of Unknown: Rat/Human CpG sequence
cggcagcagcgagagcggaagacattagagacccgaaaaataagggaaaa

SEQ ID NO: 2466 - DNA, 50 bp, Unknown
  Description of Unknown: Rat/Human CpG sequence
cgtgaccctgacaggtcctgcctatggcgcggcagaccacccacgccgag

SEQ ID NO: 2467 - DNA, 50 bp, Unknown
  Description of Unknown: Rat/Human CpG sequence
cgctttcccacacgccgctgcgccccttcagcccgcccagccactcgccg

SEQ ID NO: 2468 - DNA, 50 bp, Unknown
  Description of Unknown: Rat/Human CpG sequence
cgaacagaccgcttttattggcttttagtgctattactgctgtcataagt

SEQ ID NO: 2469 - DNA, 50 bp, Unknown
  Description of Unknown: Rat/Human CpG sequence
tttccatgatgaattgcccgaagcccctgaatcacaaaccattttttccg

SEQ ID NO: 2470 - DNA, 50 bp, Unknown
  Description of Unknown: Rat/Human CpG sequence
cttgctaccatttaaaatcagactctttttgtcttttgattgctgtctcg

SEQ ID NO: 2471 - DNA, 50 bp, Unknown
  Description of Unknown: Rat/Human CpG sequence
cgggttttgtgtttttctaaaataaagagaaggattatcagagaggagag

SEQ ID NO: 2472 - DNA, 50 bp, Unknown
  Description of Unknown: Rat/Human CpG sequence
atcttgacctgctggtcactaagattcaagcggtctgagagttccctccg

SEQ ID NO: 2473 - DNA, 50 bp, Unknown
  Description of Unknown: Rat/Human CpG sequence
tgagcttttcccctggaggatcctcatgccccatctccacctagggatcg

SEQ ID NO: 2474 - DNA, 50 bp, Unknown
  Description of Unknown: Rat/Human CpG sequence
cggctcacttcatggacattaattttaatgggacgattattaccctgttt

SEQ ID NO: 2475 - DNA, 50 bp, Unknown
  Description of Unknown: Rat/Human CpG sequence
cgctcaagtgcactttccggtccctccaggtcagcaggctgcccagcagc

SEQ ID NO: 2476 - DNA, 50 bp, Unknown
  Description of Unknown: Rat/Human CpG sequence
cgctatcccggctttagggggcatctcattacctccaggggtcatcgtca

SEQ ID NO: 2477 - DNA, 50 bp, Unknown
  Description of Unknown: Rat/Human CpG sequence
cggaagtgtgtgttgacacaaatgattaaggccaggattcctacaattga

SEQ ID NO: 2478 - DNA, 50 bp, Unknown
  Description of Unknown: Rat/Human CpG sequence
aagctctgtcccatttggctaattcagaagttaatggaaggtctctttcg

SEQ ID NO: 2479 - DNA, 50 bp, Unknown
  Description of Unknown: Rat/Human CpG sequence
ggtgggctttgtcaccagcacgctgggtctggcatgcccagctatgctcg

SEQ ID NO: 2480 - DNA, 50 bp, Unknown
  Description of Unknown: Rat/Human CpG sequence
cggaaatttgaataccacagtagcatggagtgtgacctcatggagactga

SEQ ID NO: 2481 - DNA, 50 bp, Unknown
  Description of Unknown: Rat/Human CpG sequence
gtgctgtccctctccactttccacatccacaagcgtaggatgaagaagcg

SEQ ID NO: 2482 - DNA, 50 bp, Unknown
  Description of Unknown: Rat/Human CpG sequence
ttcttttcattatttccctccaaaggtcagttatcctctcaggcggggcg

SEQ ID NO: 2483 - DNA, 50 bp, Unknown
  Description of Unknown: Rat/Human CpG sequence
cggttctcatccacatgaccgacagcggccaatggaagggccgaacaact

SEQ ID NO: 2484 - DNA, 50 bp, Unknown
  Description of Unknown: Rat/Human CpG sequence
ggttcttaaaccagttgctgacctgggtggtggtgaggccggtggcctcg

SEQ ID NO: 2485 - DNA, 50 bp, Unknown
  Description of Unknown: Rat/Human CpG sequence
cgacaggtcagacttgaacaggcaaggtccaccaccaaccatcgtcgagt

SEQ ID NO: 2486 - DNA, 50 bp, Unknown
  Description of Unknown: Rat/Human CpG sequence
gtcattttatggtcaattttcagagtgtaactgcactttaagcactaacg

SEQ ID NO: 2487 - DNA, 50 bp, Unknown
  Description of Unknown: Rat/Human CpG sequence
cgcaagtaggaagctttttgcactccaccacctctggccgctgggaagac

SEQ ID NO: 2488 - DNA, 50 bp, Unknown
  Description of Unknown: Rat/Human CpG sequence
cgccagggctgccagcaatttgcttatcagagtcactttgaaacagcttt

SEQ ID NO: 2489 - DNA, 50 bp, Unknown
  Description of Unknown: Rat/Human CpG sequence
cttctgcactccgtgtcctaaatatggataattagcatcagtttatcacg

SEQ ID NO: 2490 - DNA, 50 bp, Unknown
  Description of Unknown: Rat/Human CpG sequence
atctgtgattggttatctctctatcatgcattgcttcacaaggggaaacg

SEQ ID NO: 2491 - DNA, 50 bp, Unknown
  Description of Unknown: Rat/Human CpG sequence
ataagccgtctgcagtatagttaactttcaatttcagccaattttcgacg

SEQ ID NO: 2492 - DNA, 50 bp, Unknown
  Description of Unknown: Rat/Human CpG sequence
ataacttgtattaaaataccaattacatttataggaccttttaaaactcg

SEQ ID NO: 2493 - DNA, 50 bp, Unknown
  Description of Unknown: Rat/Human CpG sequence
tatgttagaaacatacagtgtggcatttagtatatacactcccttgctcg

SEQ ID NO: 2494 - DNA, 50 bp, Unknown
  Description of Unknown: Rat/Human CpG sequence
caccaccttctccttggtaacagataagagtctttccacttcaatcttcg

SEQ ID NO: 2495 - DNA, 50 bp, Unknown
  Description of Unknown: Rat/Human CpG sequence
gacagagcaataaatcaactaataactggaacctcattttctgctccacg

SEQ ID NO: 2496 - DNA, 50 bp, Unknown
  Description of Unknown: Rat/Human CpG sequence
cggctgtatttcgggatctattatagtctgtccagacagatcccattgta

SEQ ID NO: 2497 - DNA, 50 bp, Unknown
  Description of Unknown: Rat/Human CpG sequence
cgcctccagaataacgagccgaaaacatgtgtactgtaaataaagcctgt

SEQ ID NO: 2498 - DNA, 50 bp, Unknown
  Description of Unknown: Rat/Human CpG sequence
actgatgtgcagcagaaaatggctcctttcccctttccctccaccgaacg

SEQ ID NO: 2499 - DNA, 50 bp, Unknown
  Description of Unknown: Rat/Human CpG sequence
cgccgccgccgccaaggggagtttccaggaagtggccatattggatccat

SEQ ID NO: 2500 - DNA, 50 bp, Unknown
  Description of Unknown: Rat/Human CpG sequence
gtcggtcatggcgccctggtccctcacgtactggttaaaattaggagacg

SEQ ID NO: 2501 - DNA, 50 bp, Unknown
  Description of Unknown: Rat/Human CpG sequence
agttggtgtggtacagcttggcagcctcctgagccgggagcatcgcggcg

SEQ ID NO: 2502 - DNA, 50 bp, Unknown
  Description of Unknown: Rat/Human CpG sequence
cggcggaatttttaaagagggatgtggttaccttgagcagaaatacccaa

SEQ ID NO: 2503 - DNA, 50 bp, Unknown
  Description of Unknown: Rat/Human CpG sequence
cggagctatttaacctgagcatccccaggtgtacggaggcgcctggctgt

SEQ ID NO: 2504 - DNA, 50 bp, Unknown
  Description of Unknown: Rat/Human CpG sequence
atgacctttgatgtgtttaaataacatggcaagtctgagcacacacctcg

SEQ ID NO: 2505 - DNA, 50 bp, Unknown
  Description of Unknown: Rat/Human CpG sequence
tttttttttttcaaagaaagtcacttttaattcccagggctccccgctcg

SEQ ID NO: 2506 - DNA, 50 bp, Unknown
  Description of Unknown: Rat/Human CpG sequence
tgtgtagcgtggccagtagcagcgacatcagcttgggttcgaccaaaacg

SEQ ID NO: 2507 - DNA, 50 bp, Unknown
  Description of Unknown: Rat/Human CpG sequence
cgggctttgattgacagctggagtggcaaaaagccatgaaacacgacagt

SEQ ID NO: 2508 - DNA, 50 bp, Unknown
  Description of Unknown: Rat/Human CpG sequence
taggtgctggtccttggctgtttgcaaccacttttctgatgcggttgacg

SEQ ID NO: 2509 - DNA, 50 bp, Unknown
  Description of Unknown: Rat/Human CpG sequence
ccgctgtggtgagaacagagttgacacttctttcctttccacttactgcg

SEQ ID NO: 2510 - DNA, 50 bp, Unknown
  Description of Unknown: Rat/Human CpG sequence
cgggctaattagccaatcaaattaaatgcagcacctgctcccagcctgat

SEQ ID NO: 2511 - DNA, 50 bp, Unknown
  Description of Unknown: Rat/Human CpG sequence
cggtaacttataacttatatattagggcccatgtgacctaataaagaaca

SEQ ID NO: 2512 - DNA, 50 bp, Unknown
  Description of Unknown: Rat/Human CpG sequence
cggggtttagggtttttgtaatccccctaaactgtctttgttcgaaatct

SEQ ID NO: 2513 - DNA, 50 bp, Unknown
  Description of Unknown: Rat/Human CpG sequence
cattgaccctgaaacctatgaggacccaaatagagctgtccatcaattcg

SEQ ID NO: 2514 - DNA, 50 bp, Unknown
  Description of Unknown: Rat/Human CpG sequence
ccagtttgctggaccagttccctcgggccttattctcatccccttgctcg

SEQ ID NO: 2515 - DNA, 50 bp, Unknown
  Description of Unknown: Rat/Human CpG sequence
cggccaggatggtattcaatttgtcctgatcactgggctgcagtgagttc

SEQ ID NO: 2516 - DNA, 50 bp, Unknown
  Description of Unknown: Rat/Human CpG sequence
cgcggagggagatgttgttattttttgctgttgtgcgtccctgacgtcac

SEQ ID NO: 2517 - DNA, 50 bp, Unknown
  Description of Unknown: Rat/Human CpG sequence
cagtaatccaataagagcattgattaggctacaatgattcaattcaagcg

SEQ ID NO: 2518 - DNA, 50 bp, Unknown
  Description of Unknown: Rat/Human CpG sequence
cgtcggcctaccccagccaccccatgccctacagctccgtgttgactcag

SEQ ID NO: 2519 - DNA, 50 bp, Unknown
  Description of Unknown: Rat/Human CpG sequence
tactccacatcagtaaatgtttacgtaacctgtcctttcccaagaatccg

SEQ ID NO: 2520 - DNA, 50 bp, Unknown
  Description of Unknown: Rat/Human CpG sequence
gcggccctagagttaatcccatcagccgaggtgaggcacctgttaccccg

SEQ ID NO: 2521 - DNA, 50 bp, Unknown
  Description of Unknown: Rat/Human CpG sequence
cgtgtttaaaaacagtgttctgacactttattgcacaatgagctcttaca

SEQ ID NO: 2522 - DNA, 50 bp, Unknown
  Description of Unknown: Rat/Human CpG sequence
aaaaaatcgcaaaaaatccctaaaaatccgggatgctcccccttttctcg

SEQ ID NO: 2523 - DNA, 50 bp, Unknown
  Description of Unknown: Rat/Human CpG sequence
tgtggtcacctggcatttggggcggcgtgaggccctgctggaaggggtcg

SEQ ID NO: 2524 - DNA, 50 bp, Unknown
  Description of Unknown: Rat/Human CpG sequence
cgtctgttctgtggacaactgttactgttcttccgtggccaaccatggcg

SEQ ID NO: 2525 - DNA, 50 bp, Unknown
  Description of Unknown: Rat/Human CpG sequence
aaaaagcattagtaacactcctggttttaaatgaaccctattaatattcg

SEQ ID NO: 2526 - DNA, 50 bp, Unknown
  Description of Unknown: Rat/Human CpG sequence
cgaagaatatagtgggctttattagcaccagtttcgctccctgactgacg

SEQ ID NO: 2527 - DNA, 50 bp, Unknown
  Description of Unknown: Rat/Human CpG sequence
cgctcaaacatgtgtgctaaaggcaaataggaaatgtgcacatccgcaca

SEQ ID NO: 2528 - DNA, 50 bp, Unknown
  Description of Unknown: Rat/Human CpG sequence
tgggcaggtgccatcccgcgccctaaaaataacggcagggaactaggtcg

SEQ ID NO: 2529 - DNA, 50 bp, Unknown
  Description of Unknown: Rat/Human CpG sequence
cgcaaagtgcccagtccggaggcgtttctgggcaaaccctggtcctcctg

SEQ ID NO: 2530 - DNA, 50 bp, Unknown
  Description of Unknown: Rat/Human CpG sequence
cgccccgttcttgaccaaacatgacagactctgaacatgcagggcacgac

SEQ ID NO: 2531 - DNA, 50 bp, Unknown
  Description of Unknown: Rat/Human CpG sequence
cggcctcggctcctaattggaagcattgggcattatcaacggaggatttg

SEQ ID NO: 2532 - DNA, 50 bp, Unknown
  Description of Unknown: Rat/Human CpG sequence
cgctggtctccgtgttggtgggtttataatctacataaaattcctgggtg

SEQ ID NO: 2533 - DNA, 50 bp, Unknown
  Description of Unknown: Rat/Human CpG sequence
cgctgacactccagtatttaattatgcagctgtcagagcggccctttcga

SEQ ID NO: 2534 - DNA, 50 bp, Unknown
  Description of Unknown: Rat/Human CpG sequence
cgcacgctgtctcgccatggctttgatgtctgtgccaagctggcttggga

SEQ ID NO: 2535 - DNA, 50 bp, Unknown
  Description of Unknown: Rat/Human CpG sequence
gatggaaaacttttaagccctggctattagcacgcggccaacaaaagccg

SEQ ID NO: 2536 - DNA, 50 bp, Unknown
  Description of Unknown: Rat/Human CpG sequence
cgccactttattgaaaatagcctgtaagttgttattaaatgtattgactg

SEQ ID NO: 2537 - DNA, 50 bp, Unknown
  Description of Unknown: Rat/Human CpG sequence
acctgcttgtccttctgcagctgcttctcgatctttttgttggcctcacg

SEQ ID NO: 2538 - DNA, 50 bp, Unknown
  Description of Unknown: Rat/Human CpG sequence
gggtcacgtgctcccctcattccttaagggcggcctgggaattagtgtcg

SEQ ID NO: 2539 - DNA, 50 bp, Unknown
  Description of Unknown: Rat/Human CpG sequence
tcataagtgtcaggacataccaaggttagcggtcactggaagtgtgctcg

SEQ ID NO: 2540 - DNA, 50 bp, Unknown
  Description of Unknown: Rat/Human CpG sequence
gatttataaatattgtgcactatctgctgtggcatggctctcatgggacg

SEQ ID NO: 2541 - DNA, 50 bp, Unknown
  Description of Unknown: Rat/Human CpG sequence
tcccatctgtggtctccaagtgtctgcctcttgatttaactttgtccccg

SEQ ID NO: 2542 - DNA, 50 bp, Unknown
  Description of Unknown: Rat/Human CpG sequence
gcctaccacaagtcggtgtggcggggggtggaggccaagctgcacctgcg

SEQ ID NO: 2543 - DNA, 50 bp, Unknown
  Description of Unknown: Rat/Human CpG sequence
ttcagtagaaaatgacgggtgatttttgcccttgtctcccgagatctccg

SEQ ID NO: 2544 - DNA, 50 bp, Unknown
  Description of Unknown: Rat/Human CpG sequence
ccgaagcgaccctgacatttagaaagactccaattgcctcgttaaaatcg

SEQ ID NO: 2545 - DNA, 50 bp, Unknown
  Description of Unknown: Rat/Human CpG sequence
cgccccgaggtctttctgagcagactgctaagcactggctgtctcccccg

SEQ ID NO: 2546 - DNA, 50 bp, Unknown
  Description of Unknown: Rat/Human CpG sequence
ttaataatctgtcatcaggaccagaggcagtcataaattatatgggagcg

SEQ ID NO: 2547 - DNA, 50 bp, Unknown
  Description of Unknown: Rat/Human CpG sequence
gagtgatccggcaatgcgctcctgaccttgcaggacagctaatccatccg

SEQ ID NO: 2548 - DNA, 50 bp, Unknown
  Description of Unknown: Rat/Human CpG sequence
cgacggcctaaagttcttcaaagagaggtagatgtgtatgatattttcat

SEQ ID NO: 2549 - DNA, 50 bp, Unknown
  Description of Unknown: Rat/Human CpG sequence
tggtgaaggcatttaacaaagacttcattttccctctgactttggcagcg

SEQ ID NO: 2550 - DNA, 50 bp, Unknown
  Description of Unknown: Rat/Human CpG sequence
cctgcttaggatgagaacaagttgagcagtgccaacggccatgaagaacg

SEQ ID NO: 2551 - DNA, 50 bp, Unknown
  Description of Unknown: Rat/Human CpG sequence
cgcctgtaggaaatattaatagactattatgaggtcctacaactaatttt

SEQ ID NO: 2552 - DNA, 50 bp, Unknown
  Description of Unknown: Rat/Human CpG sequence
ttgacttgacgtttggatctaagaggccttccttcgccatccattcatcg

SEQ ID NO: 2553 - DNA, 50 bp, Unknown
  Description of Unknown: Rat/Human CpG sequence
cgccgtgatcagttggactaaggatggggtgcacttggggcccaacaata

SEQ ID NO: 2554 - DNA, 50 bp, Unknown
  Description of Unknown: Rat/Human CpG sequence
cgagggctggggccccctcagtttgtgtaaacctgagttccgatcacacg

SEQ ID NO: 2555 - DNA, 50 bp, Unknown
  Description of Unknown: Rat/Human CpG sequence
cgcctcctgaactaaagatagaaacagctggcccttccaggcagctaaaa

SEQ ID NO: 2556 - DNA, 50 bp, Unknown
  Description of Unknown: Rat/Human CpG sequence
cgcgcctctccccggccgggcggacacttggttcattccagccgcagaag

SEQ ID NO: 2557 - DNA, 50 bp, Unknown
  Description of Unknown: Rat/Human CpG sequence
cggatcctggggtgggggaactcctcactataatccagcaacttgccaac

SEQ ID NO: 2558 - DNA, 50 bp, Unknown
  Description of Unknown: Rat/Human CpG sequence
cgattgctgtttgaataacagattaatttaataatcagtggggtattgga

SEQ ID NO: 2559 - DNA, 50 bp, Unknown
  Description of Unknown: Rat/Human CpG sequence
acatttagtccgggggtgactcttctccttggcacttgtagaataaatcg

SEQ ID NO: 2560 - DNA, 50 bp, Unknown
  Description of Unknown: Rat/Human CpG sequence
cctcttttgtttatctgacagctaaatatcaaggcaatcaccgcctcgcg

SEQ ID NO: 2561 - DNA, 50 bp, Unknown
  Description of Unknown: Rat/Human CpG sequence
ttgtgcgtttcccaaagtctacaggcttttgatgaaaaattcatggcacg

SEQ ID NO: 2562 - DNA, 50 bp, Unknown
  Description of Unknown: Rat/Human CpG sequence
tccatgtcggctcggaacagattcgcctccatgtgtctctgcgtggtacg

SEQ ID NO: 2563 - DNA, 50 bp, Unknown
  Description of Unknown: Rat/Human CpG sequence
cggaaaatgaaaatatttattttaaaaattgaaatgtttggaacctttag

SEQ ID NO: 2564 - DNA, 50 bp, Unknown
  Description of Unknown: Rat/Human CpG sequence
cgggttcttgtccgggtggtacttgagcgccagcttccgataggccttct

SEQ ID NO: 2565 - DNA, 50 bp, Unknown
  Description of Unknown: Rat/Human CpG sequence
tggaaggatgctgaaatgacaggcctagtagacgcttgtcttaatcatcg

SEQ ID NO: 2566 - DNA, 50 bp, Unknown
  Description of Unknown: Rat/Human CpG sequence
cgggcactactccatgcactgtttacactcggcgggccattcgcagcccg

SEQ ID NO: 2567 - DNA, 50 bp, Unknown
  Description of Unknown: Rat/Human CpG sequence
acctcttgttcaccagatcactttgtgtgcacttgtatatttcattgtcg

SEQ ID NO: 2568 - DNA, 50 bp, Unknown
  Description of Unknown: Rat/Human CpG sequence
cgcctaattaaattaattagggattcttgtcaatcctggattaatggcca

SEQ ID NO: 2569 - DNA, 50 bp, Unknown
  Description of Unknown: Rat/Human CpG sequence
taacacacctcgtgcacgacaaaaatttgctcctggcaatcatggtttcg

SEQ ID NO: 2570 - DNA, 50 bp, Unknown
  Description of Unknown: Rat/Human CpG sequence
agccctcccaccccctgagatcaaggcaatggtggttttacaggctgacg

SEQ ID NO: 2571 - DNA, 50 bp, Unknown
  Description of Unknown: Rat/Human CpG sequence
cggtgtctaaatgcattcatatttttatgattgttttgtaaatatctttg

SEQ ID NO: 2572 - DNA, 50 bp, Unknown
  Description of Unknown: Rat/Human CpG sequence
cgctgaccctgctgtttagcccattaatgatgatgcacaagcttcacttt

SEQ ID NO: 2573 - DNA, 50 bp, Unknown
  Description of Unknown: Rat/Human CpG sequence
gacgcagccagccattcaggaaggcagcgctggagagcgggaggcagccg

SEQ ID NO: 2574 - DNA, 50 bp, Unknown
  Description of Unknown: Rat/Human CpG sequence
tgggcacttgcacagagatgatctctgccatcatttccggaaagtccacg

SEQ ID NO: 2575 - DNA, 50 bp, Unknown
  Description of Unknown: Rat/Human CpG sequence
ctcccctcggcggggctgaatgatcaaaactggtggtgagaatttttccg

SEQ ID NO: 2576 - DNA, 50 bp, Unknown
  Description of Unknown: Rat/Human CpG sequence
gtgatgacaaatgcccgttatcagcgaacgaggccgatgacaaatgggcg

SEQ ID NO: 2577 - DNA, 50 bp, Unknown
  Description of Unknown: Rat/Human CpG sequence
tatcctctaatataaatgtcagtgatgctattttccgcgcagtcatttcg

SEQ ID NO: 2578 - DNA, 50 bp, Unknown
  Description of Unknown: Rat/Human CpG sequence
cgcccgattatgcagccaattaagttatttggaatggtgagttcatgggt

SEQ ID NO: 2579 - DNA, 50 bp, Unknown
  Description of Unknown: Rat/Human CpG sequence
ggacgtgtctctgctgcaccctcttgaagcggcaggactgggcatagccg

SEQ ID NO: 2580 - DNA, 50 bp, Unknown
  Description of Unknown: Rat/Human CpG sequence
gaactgttattgtttgtgatccgctccattttatggaaacaagctctgcg

SEQ ID NO: 2581 - DNA, 50 bp, Unknown
  Description of Unknown: Rat/Human CpG sequence
atggcctccaactttaacgacatagtcaagcagggctacgtgaaaatccg

SEQ ID NO: 2582 - DNA, 50 bp, Unknown
  Description of Unknown: Rat/Human CpG sequence
cggtagaagatccagcatccaaaagtgacccagtgactggcccagctgag

SEQ ID NO: 2583 - DNA, 50 bp, Unknown
  Description of Unknown: Rat/Human CpG sequence
tcatcagagttcccccttttgttccaagtcccggagcagacaaagaggcg

SEQ ID NO: 2584 - DNA, 50 bp, Unknown
  Description of Unknown: Rat/Human CpG sequence
cgcctcctctgggcctgggagagaactgcccctacagggtggcttgcaag

SEQ ID NO: 2585 - DNA, 50 bp, Unknown
  Description of Unknown: Rat/Human CpG sequence
cgggcagcagaagatttcgtgacacttagcacgaaagggggactcttttt

SEQ ID NO: 2586 - DNA, 50 bp, Unknown
  Description of Unknown: Rat/Human CpG sequence
ttcccttgaggcaggtgatgtagcggtgacagaagttgtcgcacaggtcg

SEQ ID NO: 2587 - DNA, 50 bp, Unknown
  Description of Unknown: Rat/Human CpG sequence
cgcgctcttaatagacctgtttcaacaatgtatcttgaaaaggaatacat

SEQ ID NO: 2588 - DNA, 50 bp, Unknown
  Description of Unknown: Rat/Human CpG sequence
cgggaaggcctgagggaagcccacccgccccagagactgcccaccctggg

SEQ ID NO: 2589 - DNA, 50 bp, Unknown
  Description of Unknown: Rat/Human CpG sequence
cggaacaggatgactttgccaatatccctgacctgcaaaacccaggaacc

SEQ ID NO: 2590 - DNA, 50 bp, Unknown
  Description of Unknown: Rat/Human CpG sequence
cggtgatgcagaaggtatgtgctttttcagttctggtgctgatgctgtgt

SEQ ID NO: 2591 - DNA, 50 bp, Unknown
  Description of Unknown: Rat/Human CpG sequence
cgttggtctggcggccactttctttgaacattagctcgctttcagctcca

SEQ ID NO: 2592 - DNA, 50 bp, Unknown
  Description of Unknown: Rat/Human CpG sequence
cgcggaaatatgagcgagtaattttataagtaacaaaggatcagggatgg

SEQ ID NO: 2593 - DNA, 50 bp, Unknown
  Description of Unknown: Rat/Human CpG sequence
cattacagattaaaatgagccacatttgcagttgatggtatctgttttcg

SEQ ID NO: 2594 - DNA, 50 bp, Unknown
  Description of Unknown: Rat/Human CpG sequence
cggcctgcaagagaggcctggaagagaagcaactttagttgtgcaagcac

SEQ ID NO: 2595 - DNA, 50 bp, Unknown
  Description of Unknown: Rat/Human CpG sequence
cggtaaggcaggctgcatggaagcctgagacatatgagacatcatcattc

SEQ ID NO: 2596 - DNA, 50 bp, Unknown
  Description of Unknown: Rat/Human CpG sequence
cgcagtgacttggggccaaattggagtttatatgtcaaaacaggctcaga

SEQ ID NO: 2597 - DNA, 50 bp, Unknown
  Description of Unknown: Rat/Human CpG sequence
cgcttcctatggataacgtgccggggctgaccttgccatctggggacgga

SEQ ID NO: 2598 - DNA, 50 bp, Unknown
  Description of Unknown: Rat/Human CpG sequence
cgcgctgagctaggaataaagttcacgtaatcacatgagagtggagaaaa

SEQ ID NO: 2599 - DNA, 50 bp, Unknown
  Description of Unknown: Rat/Human CpG sequence
cgaaaacttggatatactgcagcttcttttggactacggttgtcaggtac

SEQ ID NO: 2600 - DNA, 50 bp, Unknown
  Description of Unknown: Rat/Human CpG sequence
cggagcagcgtggtgataaccagaggcgtgaaattacaaaagtaaaattt

SEQ ID NO: 2601 - DNA, 50 bp, Unknown
  Description of Unknown: Rat/Human CpG sequence
cgctgttgccctgggattccgatgaatctcctgaggcctcccctggtcct

SEQ ID NO: 2602 - DNA, 50 bp, Unknown
  Description of Unknown: Rat/Human CpG sequence
atgtggatccgaggcggaacagagcagttgttgtcccagaggatatatcg

SEQ ID NO: 2603 - DNA, 50 bp, Unknown
  Description of Unknown: Rat/Human CpG sequence
agcaaagtgctgaatggaatttgtgcctacctcaatagacattgggttcg

SEQ ID NO: 2604 - DNA, 50 bp, Unknown
  Description of Unknown: Rat/Human CpG sequence
aaaagcagcagcagagagttggagtcaccttgaccgccatgctgtgctcg

SEQ ID NO: 2605 - DNA, 50 bp, Unknown
  Description of Unknown: Rat/Human CpG sequence
tcaccatcctggacacactcgtttgtcaatgtccctctgaaaatgtgacg

SEQ ID NO: 2606 - DNA, 50 bp, Unknown
  Description of Unknown: Rat/Human CpG sequence
ccgcaggaacttaacttacacatgccgtgccaacaggaactgtcccatcg

SEQ ID NO: 2607 - DNA, 50 bp, Unknown
  Description of Unknown: Rat/Human CpG sequence
cgtccgaaacctccaactccaagggtatcaatgatgttgaaatcagacag

SEQ ID NO: 2608 - DNA, 50 bp, Unknown
  Description of Unknown: Rat/Human CpG sequence
cgaaccatcaggaaggcgtcttccttaacattaattacagaaaatgacaa

SEQ ID NO: 2609 - DNA, 50 bp, Unknown
  Description of Unknown: Rat/Human CpG sequence
catcctggatttcataaaccaaaacaagagagcctggcaggaggacagcg

SEQ ID NO: 2610 - DNA, 50 bp, Unknown
  Description of Unknown: Rat/Human CpG sequence
ccccaccaaaatttgtttcagatctaataaaactgtgcttaacacactcg

SEQ ID NO: 2611 - DNA, 50 bp, Unknown
  Description of Unknown: Rat/Human CpG sequence
acaaaaactaaattaggcttctcctgttatcctacaaatatttaatgacg

SEQ ID NO: 2612 - DNA, 50 bp, Unknown
  Description of Unknown: Rat/Human CpG sequence
tgacatctcaaagaagcactttgatgcaagcttcttttgggcctgtgacg

SEQ ID NO: 2613 - DNA, 50 bp, Unknown
  Description of Unknown: Rat/Human CpG sequence
cgtgaatctattaatttaacaggaactaggctcagcacatatattccttg

SEQ ID NO: 2614 - DNA, 50 bp, Unknown
  Description of Unknown: Rat/Human CpG sequence
ttcttctgcgatgctgtagcctcctgggtgagcccgaaggatgaccttcg

SEQ ID NO: 2615 - DNA, 50 bp, Unknown
  Description of Unknown: Rat/Human CpG sequence
cgctgccccagactcacagagtcttgggcatctcgtcctccatggctgct

SEQ ID NO: 2616 - DNA, 50 bp, Unknown
  Description of Unknown: Rat/Human CpG sequence
aggctgctgaaaccatcaatcttgctggctcttgtagaggtcaagagacg

SEQ ID NO: 2617 - DNA, 50 bp, Unknown
  Description of Unknown: Rat/Human CpG sequence
ttagttccacgctatgagctaagttgataacatgaaaagacccataaacg

SEQ ID NO: 2618 - DNA, 50 bp, Unknown
  Description of Unknown: Rat/Human CpG sequence
cgatcagccagccgtgaactctgggccgaattcattacagtttaatagtg

SEQ ID NO: 2619 - DNA, 50 bp, Unknown
  Description of Unknown: Rat/Human CpG sequence
cgctagggaaataaaagcttcatctcagattataggtgggtatttttgga

SEQ ID NO: 2620 - DNA, 50 bp, Unknown
  Description of Unknown: Rat/Human CpG sequence
tggaaaagcaggacaccttctttttctttttcttgttcctctgcgcctcg

SEQ ID NO: 2621 - DNA, 50 bp, Unknown
  Description of Unknown: Rat/Human CpG sequence
gtcggctcggaacagattcgcctccatgtgtctctgcgtggtacgtgccg

SEQ ID NO: 2622 - DNA, 50 bp, Unknown
  Description of Unknown: Rat/Human CpG sequence
tctgcgggaaacatatgtcgggagaagttcacattccggattctgctccg

SEQ ID NO: 2623 - DNA, 50 bp, Unknown
  Description of Unknown: Rat/Human CpG sequence
acatacctggccatgcctttgtgcatatcattgtgcagtcgcaactgacg

SEQ ID NO: 2624 - DNA, 50 bp, Unknown
  Description of Unknown: Rat/Human CpG sequence
atactaatttcctctccaccttatcccctgaacactgcagacctttggcg

SEQ ID NO: 2625 - DNA, 50 bp, Unknown
  Description of Unknown: Rat/Human CpG sequence
atgggaagttctgtgactgctgctactgtgagttcttcggccacaatgcg

SEQ ID NO: 2626 - DNA, 50 bp, Unknown
  Description of Unknown: Rat/Human CpG sequence
gcctggagtcttttaaatataagtaacacgcaaccagtaataagctgtcg

SEQ ID NO: 2627 - DNA, 50 bp, Unknown
  Description of Unknown: Rat/Human CpG sequence
cggctagtggaccaggtgaagtacattagaaacaattactttccaactgg

SEQ ID NO: 2628 - DNA, 50 bp, Unknown
  Description of Unknown: Rat/Human CpG sequence
tcttcggttaactccgcttgtttctctacaaaatggcgccggaggtcgcg

SEQ ID NO: 2629 - DNA, 50 bp, Unknown
  Description of Unknown: Rat/Human CpG sequence
cggtgcggcacttttgtgttcagtagcatgaatcattaatcatgagacag

SEQ ID NO: 2630 - DNA, 50 bp, Unknown
  Description of Unknown: Rat/Human CpG sequence
cgtggtaacagagtgttctttgttaccacacactgctctttgttatcaca

SEQ ID NO: 2631 - DNA, 50 bp, Unknown
  Description of Unknown: Rat/Human CpG sequence
cgccaggcctaatccctacacagtggaacaaagcccagcaaagcctttga

SEQ ID NO: 2632 - DNA, 50 bp, Unknown
  Description of Unknown: Rat/Human CpG sequence
cgcacatgcgcacagagcactcaatctgacacccctcgccggggccaaaa

SEQ ID NO: 2633 - DNA, 50 bp, Unknown
  Description of Unknown: Rat/Human CpG sequence
cgcttaggcccctcaccaaactctcagtaaccatggtaactgtatacaaa

SEQ ID NO: 2634 - DNA, 50 bp, Unknown
  Description of Unknown: Rat/Human CpG sequence
cgggcggacaccgaaacacgaacaggaagaaacccccttcataaggagtg

SEQ ID NO: 2635 - DNA, 50 bp, Unknown
  Description of Unknown: Rat/Human CpG sequence
ccgaggtagggcaccactcccagggagttggggctggacacggagtagcg

SEQ ID NO: 2636 - DNA, 50 bp, Unknown
  Description of Unknown: Rat/Human CpG sequence
gggtggccccaggatatcaacaacattagcatagccctccctccccagcg

SEQ ID NO: 2637 - DNA, 50 bp, Unknown
  Description of Unknown: Rat/Human CpG sequence
cgcgatgttgtgatgaaggtgaaaagatcgctcttaattagattaaaaac

SEQ ID NO: 2638 - DNA, 50 bp, Unknown
  Description of Unknown: Rat/Human CpG sequence
cactcataaatttggcttgatgacctccgggaggttagtgatggaagccg

SEQ ID NO: 2639 - DNA, 50 bp, Unknown
  Description of Unknown: Rat/Human CpG sequence
cgtgtggcctgctctcatggagaatgactgtgtcattatgaagggagaag

SEQ ID NO: 2640 - DNA, 50 bp, Unknown
  Description of Unknown: Rat/Human CpG sequence
cggatttaaaccactagacaagctattaatttagctaggctacccagggt

SEQ ID NO: 2641 - DNA, 50 bp, Unknown
  Description of Unknown: Rat/Human CpG sequence
attgtatttgcattttaattttccacataaacaaaggcccagagtactcg

SEQ ID NO: 2642 - DNA, 50 bp, Unknown
  Description of Unknown: Rat/Human CpG sequence
tccgttccgttttggtcgaacccaagctgatgtcgctgctactggccacg

SEQ ID NO: 2643 - DNA, 50 bp, Unknown
  Description of Unknown: Rat/Human CpG sequence
cggcttgatatttccgaagaatatagtgggctttattagcaccagtttcg

SEQ ID NO: 2644 - DNA, 50 bp, Unknown
  Description of Unknown: Rat/Human CpG sequence
tccatctgctgctctgacgcctaggagcagttattccacaactgtctgcg

SEQ ID NO: 2645 - DNA, 50 bp, Unknown
  Description of Unknown: Rat/Human CpG sequence
tacagctttttgggaagctgtttgaaaattaagcttggatcagttactcg

SEQ ID NO: 2646 - DNA, 50 bp, Unknown
  Description of Unknown: Rat/Human CpG sequence
cgtgaaatactgaaatttgcccagtaccttctcagactattaacaggttc

SEQ ID NO: 2647 - DNA, 50 bp, Unknown
  Description of Unknown: Rat/Human CpG sequence
cggcgctccctgcacagggtttcctgtcaccctcgcaatgggccggacca

SEQ ID NO: 2648 - DNA, 50 bp, Unknown
  Description of Unknown: Rat/Human CpG sequence
tcttttgcacaatcacgcccacatttggggttggaaagccctaattaccg

SEQ ID NO: 2649 - DNA, 50 bp, Unknown
  Description of Unknown: Rat/Human CpG sequence
aaacttgctgtgggtgaccatggcgcacggagccagcgtggatctgcgcg

SEQ ID NO: 2650 - DNA, 50 bp, Unknown
  Description of Unknown: Rat/Human CpG sequence
cgcctgttccccatggacctgaagttgaatgcacaccttggctctgaact

SEQ ID NO: 2651 - DNA, 50 bp, Unknown
  Description of Unknown: Rat/Human CpG sequence
gtgaatatccttctccctcctgatgctaaagagattgccactcgcttccg

SEQ ID NO: 2652 - DNA, 50 bp, Unknown
  Description of Unknown: Rat/Human CpG sequence
agaagtagccttgaggggcccaccatattggacatagaaaaatttcatcg

SEQ ID NO: 2653 - DNA, 50 bp, Unknown
  Description of Unknown: Rat/Human CpG sequence
cgggagtacgtgttagtgggagcagatggctccaagcagaaaatgcctgc

SEQ ID NO: 2654 - DNA, 50 bp, Unknown
  Description of Unknown: Rat/Human CpG sequence
cgcaagggaaattataaaaaagttcatgttcacggttctcatccacatga

SEQ ID NO: 2655 - DNA, 50 bp, Unknown
  Description of Unknown: Rat/Human CpG sequence
gcgcccgatgtaactgtaattactccattgatattcctcacacaatagcg

SEQ ID NO: 2656 - DNA, 50 bp, Unknown
  Description of Unknown: Rat/Human CpG sequence
catgtttctctctattgtgccatcataaaaaaaactccgctggtgactcg

SEQ ID NO: 2657 - DNA, 50 bp, Unknown
  Description of Unknown: Rat/Human CpG sequence
tttcattatatcaatcacatttaattggcaatttgtacgagcaatgaccg

SEQ ID NO: 2658 - DNA, 50 bp, Unknown
  Description of Unknown: Rat/Human CpG sequence
cgcctctctcagggagatctggagaaatacgcagcacagatgggccgagc

SEQ ID NO: 2659 - DNA, 50 bp, Unknown
  Description of Unknown: Rat/Human CpG sequence
ttttactgcactgctccctagtatctcagattcatcttccctgacgcacg

SEQ ID NO: 2660 - DNA, 50 bp, Unknown
  Description of Unknown: Rat/Human CpG sequence
caccaggttgaggggtccttccattacttccatagaccccggggtaagcg

SEQ ID NO: 2661 - DNA, 50 bp, Unknown
  Description of Unknown: Rat/Human CpG sequence
tgtatttctgcaaatgtgtgaaatgcaaaatgtgccctccagcaaaaacg

SEQ ID NO: 2662 - DNA, 50 bp, Unknown
  Description of Unknown: Rat/Human CpG sequence
tctcgtagcccttgtagttcttcatgttcagtgtcatcttgcaggtctcg

SEQ ID NO: 2663 - DNA, 50 bp, Unknown
  Description of Unknown: Rat/Human CpG sequence
cggatgttgctcccctagattgcccgtgaggcagaggctgccatctacca

SEQ ID NO: 2664 - DNA, 50 bp, Unknown
  Description of Unknown: Rat/Human CpG sequence
ccagaccttcagctgcgaagagtgcctgttcaagaccacacaccctttcg

SEQ ID NO: 2665 - DNA, 50 bp, Unknown
  Description of Unknown: Rat/Human CpG sequence
cggtggcatgttttagatgacatttcaattgtacgagcaatttgcattct

SEQ ID NO: 2666 - DNA, 50 bp, Unknown
  Description of Unknown: Rat/Human CpG sequence
aacaagtacctggtggaggatgtgctgctgctcaacttcgaggagatgcg

SEQ ID NO: 2667 - DNA, 50 bp, Unknown
  Description of Unknown: Rat/Human CpG sequence
cggcggcaaatgacactctcggaatcttgactccaatctgatgcctggtc

SEQ ID NO: 2668 - DNA, 50 bp, Unknown
  Description of Unknown: Rat/Human CpG sequence
ttcaccaaagaaacttgcgtccattggaggtaaaatcttggctaggctcg

SEQ ID NO: 2669 - DNA, 50 bp, Unknown
  Description of Unknown: Rat/Human CpG sequence
cgaagttcttggtgaagaccagggtgaccagcaggatgggcaccagcacg

SEQ ID NO: 2670 - DNA, 50 bp, Unknown
  Description of Unknown: Rat/Human CpG sequence
attgtttacttatctgcgggaaacatatgtcgggagaagttcacattccg

SEQ ID NO: 2671 - DNA, 50 bp, Unknown
  Description of Unknown: Rat/Human CpG sequence
cgcccaaatcaatgtggtttctttggaacattttcagcaaaggaacgcat

SEQ ID NO: 2672 - DNA, 50 bp, Unknown
  Description of Unknown: Rat/Human CpG sequence
cagctcactgggcttgaggttggggtctatgatgagctcccagctgtccg

SEQ ID NO: 2673 - DNA, 50 bp, Unknown
  Description of Unknown: Rat/Human CpG sequence
cggccagacgttggaggcagctaaagccacatcaaagctttccttgaaat

SEQ ID NO: 2674 - DNA, 50 bp, Unknown
  Description of Unknown: Rat/Human CpG sequence
cgggagcagaaattgcctgtccggttttatgatctgctcagcctgagcag

SEQ ID NO: 2675 - DNA, 50 bp, Unknown
  Description of Unknown: Rat/Human CpG sequence
cggaacctcacttacatggtgacccgcagggaaaagattaaacggtctgt

SEQ ID NO: 2676 - DNA, 50 bp, Unknown
  Description of Unknown: Rat/Human CpG sequence
cgccggtgctcatctccatcctgctcggcgccagcttcagccgctaccag

SEQ ID NO: 2677 - DNA, 50 bp, Unknown
  Description of Unknown: Rat/Human CpG sequence
cgccgagttttattctgtcctgtggctcagagttgaagttccccaagtga

SEQ ID NO: 2678 - DNA, 50 bp, Unknown
  Description of Unknown: Rat/Human CpG sequence
atgatttctgtcaaaatcatctttaccacaattataatatgttaattacg

SEQ ID NO: 2679 - DNA, 50 bp, Unknown
  Description of Unknown: Rat/Human CpG sequence
agcacgcacagcagagccctagtcgataagaagttgcaaatcagtattcg

SEQ ID NO: 2680 - DNA, 50 bp, Unknown
  Description of Unknown: Rat/Human CpG sequence
cgacatcagtggcaacgtcctcgctctgatcttcaaccaaggcatgatct

SEQ ID NO: 2681 - DNA, 50 bp, Unknown
  Description of Unknown: Rat/Human CpG sequence
ctgggcggccgctctgcaggaagcagtaaccgagaccctgtctgactacg

SEQ ID NO: 2682 - DNA, 50 bp, Unknown
  Description of Unknown: Rat/Human CpG sequence
cgcttattaaagtcaagcatgtgtctttgtttcatgttgctaatgatgtg

SEQ ID NO: 2683 - DNA, 50 bp, Unknown
  Description of Unknown: Rat/Human CpG sequence
cgccagtctgtgatttagctgtcgccagacaccccatgttttttgtgaga

SEQ ID NO: 2684 - DNA, 50 bp, Unknown
  Description of Unknown: Rat/Human CpG sequence
cgtactggtttctgcagtctcgtactcgctgtctctgagaagctcaaaga

SEQ ID NO: 2685 - DNA, 50 bp, Unknown
  Description of Unknown: Rat/Human CpG sequence
cgctcagccgccggaatcgcagccactgccggcttcacagacgcctgcct

SEQ ID NO: 2686 - DNA, 50 bp, Unknown
  Description of Unknown: Rat/Human CpG sequence
cgtcttcgttgccatagaaaccaaggctacctttgggctcatccggagtg

SEQ ID NO: 2687 - DNA, 50 bp, Unknown
  Description of Unknown: Rat/Human CpG sequence
gttcatccagagcagcttcctccgaggccatggattacattaaaagaacg

SEQ ID NO: 2688 - DNA, 50 bp, Unknown
  Description of Unknown: Rat/Human CpG sequence
agtttggggccccaggctttcactcccataattctaacagggcaatcacg

SEQ ID NO: 2689 - DNA, 50 bp, Unknown
  Description of Unknown: Rat/Human CpG sequence
tgttcaggctactgttgatgcaaatactactgccattcgcggcagcagcg

SEQ ID NO: 2690 - DNA, 50 bp, Unknown
  Description of Unknown: Rat/Human CpG sequence
gagcaatgttctgtgatggtgcccgagatgcgtggactgagcccagaccg

SEQ ID NO: 2691 - DNA, 50 bp, Unknown
  Description of Unknown: Rat/Human CpG sequence
atttcacagtacacgctttcaaaagcagtctcaggtggcctgatgaaacg

SEQ ID NO: 2692 - DNA, 50 bp, Unknown
  Description of Unknown: Rat/Human CpG sequence
gcatagccaatagctctggggctcctgctactgcgcgctgattgttaccg

SEQ ID NO: 2693 - DNA, 50 bp, Unknown
  Description of Unknown: Rat/Human CpG sequence
cggacccccttgtagatatagaagtacagctcccggcccacattgaagca

SEQ ID NO: 2694 - DNA, 50 bp, Unknown
  Description of Unknown: Rat/Human CpG sequence
cgtgacctctataatgcttcttaaattgaggacaatgatggacccaccaa

SEQ ID NO: 2695 - DNA, 50 bp, Unknown
  Description of Unknown: Rat/Human CpG sequence
cggaccattagttacatatttgaaccaataaggaaacacttaccgagcgc

SEQ ID NO: 2696 - DNA, 50 bp, Unknown
  Description of Unknown: Rat/Human CpG sequence
cctgtgacaccagctaaattaatcactcactgcactcagggaagtcaccg

SEQ ID NO: 2697 - DNA, 50 bp, Unknown
  Description of Unknown: Rat/Human CpG sequence
cggtttgtattctcctacggcttttacagaagttgcagtgatccaaagtc

SEQ ID NO: 2698 - DNA, 50 bp, Unknown
  Description of Unknown: Rat/Human CpG sequence
actttacattttggagacaaacctgtgtgagttttttattggtacaaacg

SEQ ID NO: 2699 - DNA, 50 bp, Unknown
  Description of Unknown: Rat/Human CpG sequence
atctgcaccctcaaggtgttccaggacagcaaggcctgggagaacttccg

SEQ ID NO: 2700 - DNA, 50 bp, Unknown
  Description of Unknown: Rat/Human CpG sequence
cgtcctctacctgaaccccgatggactggaatttggtagcgggactgggc

SEQ ID NO: 2701 - DNA, 50 bp, Unknown
  Description of Unknown: Rat/Human CpG sequence
cgccatggacctgctgcgcatcccaggcctgctcatgtacatgatccggc

SEQ ID NO: 2702 - DNA, 50 bp, Unknown
  Description of Unknown: Rat/Human CpG sequence
ggacaccctgctggtgtctaggtaggagttggagtgcgtcccggtctccg

SEQ ID NO: 2703 - DNA, 50 bp, Unknown
  Description of Unknown: Rat/Human CpG sequence
cggaattatgatacagtggagccttcacgcaattctttgttgaagaagtt

SEQ ID NO: 2704 - DNA, 50 bp, Unknown
  Description of Unknown: Rat/Human CpG sequence
cgcgggtcacagattgaatcaattgtccaatcttgtgaaagtcatatcct

SEQ ID NO: 2705 - DNA, 50 bp, Unknown
  Description of Unknown: Rat/Human CpG sequence
taatgaaatgaagcacagatctaaagattactcagcccctttgtcagtcg

SEQ ID NO: 2706 - DNA, 50 bp, Unknown
  Description of Unknown: Rat/Human CpG sequence
cgggggtttatttgatctcacattaaccaaggaggagaatgtgagaaaag

SEQ ID NO: 2707 - DNA, 50 bp, Unknown
  Description of Unknown: Rat/Human CpG sequence
ttaattcctttgttaatgtctttatgaatgcaattaacacttcattcacg

SEQ ID NO: 2708 - DNA, 50 bp, Unknown
  Description of Unknown: Rat/Human CpG sequence
ctctcgttgccacgtagcaggtcgctctggggcagggaccacaggaaccg

SEQ ID NO: 2709 - DNA, 50 bp, Unknown
  Description of Unknown: Rat/Human CpG sequence
cggacctccttgctaagcaccacataggagaggaagatgaaggggccctg

SEQ ID NO: 2710 - DNA, 50 bp, Unknown
  Description of Unknown: Rat/Human CpG sequence
cggctctttctgggttatcaggcgccagtccaagtcctcccaggcagcca

SEQ ID NO: 2711 - DNA, 50 bp, Unknown
  Description of Unknown: Rat/Human CpG sequence
taggccgcaaatcgcgctgagcctccctaagtgacagcgagagaatcgcg

SEQ ID NO: 2712 - DNA, 50 bp, Unknown
  Description of Unknown: Rat/Human CpG sequence
cgctccttgctctgtaaagtggatgtcaggtggatctatgtttctgaagg

SEQ ID NO: 2713 - DNA, 50 bp, Unknown
  Description of Unknown: Rat/Human CpG sequence
cgtcacaataagtggtagtaatagaaccatatacaggattgtaaatacaa

SEQ ID NO: 2714 - DNA, 50 bp, Unknown
  Description of Unknown: Rat/Human CpG sequence
aaaagaacttcagtggcgtaaacaccgtttgtgctgtgtccccagcctcg

SEQ ID NO: 2715 - DNA, 50 bp, Unknown
  Description of Unknown: Rat/Human CpG sequence
ttgaactgatttcacaaataccctttcatttcactacttcattatgctcg

SEQ ID NO: 2716 - DNA, 50 bp, Unknown
  Description of Unknown: Rat/Human CpG sequence
cgcctgacttttaccaacttcagcacgccagctgaggcctatcccagctg

SEQ ID NO: 2717 - DNA, 50 bp, Unknown
  Description of Unknown: Rat/Human CpG sequence
cgtccctttcaaagtctccgagttcttcatgcttgttgttgagatttgag

SEQ ID NO: 2718 - DNA, 50 bp, Unknown
  Description of Unknown: Rat/Human CpG sequence
acagctcactaattaattagcgcttaagtacttagcatcctcctgcatcg

SEQ ID NO: 2719 - DNA, 50 bp, Unknown
  Description of Unknown: Rat/Human CpG sequence
cgtttgattagtgctacaaaaatttaattaggttggctaattacttgaca

SEQ ID NO: 2720 - DNA, 50 bp, Unknown
  Description of Unknown: Rat/Human CpG sequence
cggtttggtttctttaatcattagttgcagcgatgcgctggcaaacccag

SEQ ID NO: 2721 - DNA, 50 bp, Unknown
  Description of Unknown: Rat/Human CpG sequence
cgcggatgaaattagcacttcctgctatgtcgggcagataaactttgctg

SEQ ID NO: 2722 - DNA, 50 bp, Unknown
  Description of Unknown: Rat/Human CpG sequence
cgcaagttgacggaggcttttgattgaattgactgattgcctcagctgca

SEQ ID NO: 2723 - DNA, 50 bp, Unknown
  Description of Unknown: Rat/Human CpG sequence
agatctcgcctttccagatgcaaaagttcagcccctctgatgtcatgacg

SEQ ID NO: 2724 - DNA, 50 bp, Unknown
  Description of Unknown: Rat/Human CpG sequence
atgatcctgtctggcttgcctgccccagattttattgattaccctgagcg

SEQ ID NO: 2725 - DNA, 50 bp, Unknown
  Description of Unknown: Rat/Human CpG sequence
cgttcatggaagtgtgaaatggcaaacaggtgaatgtccaattacactgt

SEQ ID NO: 2726 - DNA, 50 bp, Unknown
  Description of Unknown: Rat/Human CpG sequence
ttttgacagcgatcatttgcttcctctgctggatgatctctaccaactcg

SEQ ID NO: 2727 - DNA, 50 bp, Unknown
  Description of Unknown: Rat/Human CpG sequence
ttcttattcaaaacaggcccacaatgggcttcacagtgcgcctcgccacg

SEQ ID NO: 2728 - DNA, 50 bp, Unknown
  Description of Unknown: Rat/Human CpG sequence
cgcctaaggaggcataaaaggccaccaggaaataaattaaaattaaaata

SEQ ID NO: 2729 - DNA, 50 bp, Unknown
  Description of Unknown: Rat/Human CpG sequence
cccatcctgctgggtcaagtaggattccatttcaatttctttacacaacg

SEQ ID NO: 2730 - DNA, 50 bp, Unknown
  Description of Unknown: Rat/Human CpG sequence
gagttactgggattttgtctacggccttggcggtcatcatttgctcctcg

SEQ ID NO: 2731 - DNA, 50 bp, Unknown
  Description of Unknown: Rat/Human CpG sequence
cgaaaggcaagagaatttcttcattgcccttggtgaaccgaaatggatgg

SEQ ID NO: 2732 - DNA, 50 bp, Unknown
  Description of Unknown: Rat/Human CpG sequence
gggcatcaggtggtagttcatggcgtccagcagcagcttctggcagaccg

SEQ ID NO: 2733 - DNA, 50 bp, Unknown
  Description of Unknown: Rat/Human CpG sequence
acaaatgtggctgctggggaaagtgacacgggctccaggtgatggattcg

SEQ ID NO: 2734 - DNA, 50 bp, Unknown
  Description of Unknown: Rat/Human CpG sequence
cgggcttcttcctgagcctgctgcacttctaccgcactggccacctgcac

SEQ ID NO: 2735 - DNA, 50 bp, Unknown
  Description of Unknown: Rat/Human CpG sequence
gcatctactgcagtgaaggcacttgtagcattatggtgacagctgcctcg

SEQ ID NO: 2736 - DNA, 50 bp, Unknown
  Description of Unknown: Rat/Human CpG sequence
cggcacttgcaagatatggttgccgtagcaacaggccttctaatctggta

SEQ ID NO: 2737 - DNA, 50 bp, Unknown
  Description of Unknown: Rat/Human CpG sequence
ggacctctattgctatatcttggaagccaccttcttgatttccactgacg

SEQ ID NO: 2738 - DNA, 50 bp, Unknown
  Description of Unknown: Rat/Human CpG sequence
cggttgtaattcaaatctaattcagaacatcttagcaccggatctgtcag

SEQ ID NO: 2739 - DNA, 50 bp, Unknown
  Description of Unknown: Rat/Human CpG sequence
ttagcaaaaatcctatgaaagactgttgggaacagagcagcccgtaagcg

SEQ ID NO: 2740 - DNA, 50 bp, Unknown
  Description of Unknown: Rat/Human CpG sequence
atggtgagcttctccgccagcttctgctgactgggctgcagcactgagcg

SEQ ID NO: 2741 - DNA, 50 bp, Unknown
  Description of Unknown: Rat/Human CpG sequence
cattgttcccggctagctcttatctcccaggagcaagtatcctgtgtgcg

SEQ ID NO: 2742 - DNA, 50 bp, Unknown
  Description of Unknown: Rat/Human CpG sequence
gccaggccagcatggccagcaccttggccgtgaggttttcgtaggcgtcg

SEQ ID NO: 2743 - DNA, 50 bp, Unknown
  Description of Unknown: Rat/Human CpG sequence
cgcgcccagtagaatattgtattagttggttgtgagctgtgttctcgtca

SEQ ID NO: 2744 - DNA, 50 bp, Unknown
  Description of Unknown: Rat/Human CpG sequence
cgttctgttccaataacctgagaaaagtttatggacatgccttgctgcct

SEQ ID NO: 2745 - DNA, 50 bp, Unknown
  Description of Unknown: Rat/Human CpG sequence
cgccgggtattttcccaggtagcttagaggggaaccttgtaagacatgga

SEQ ID NO: 2746 - DNA, 50 bp, Unknown
  Description of Unknown: Rat/Human CpG sequence
cgtcccagggcaaaccggatgtgaaataggcggtgacttcatgccagaga

SEQ ID NO: 2747 - DNA, 50 bp, Unknown
  Description of Unknown: Rat/Human CpG sequence
cgccggattatacgtggccgattcccagtgattgccctgctacacaaagc

SEQ ID NO: 2748 - DNA, 50 bp, Unknown
  Description of Unknown: Rat/Human CpG sequence
atcattaaggttcaacagcattcagaagctcaaatccaatcagtttgccg

SEQ ID NO: 2749 - DNA, 50 bp, Unknown
  Description of Unknown: Rat/Human CpG sequence
cggcaaactgaaattaacagctactggagcgcattaataatctgcctcac

SEQ ID NO: 2750 - DNA, 50 bp, Unknown
  Description of Unknown: Rat/Human CpG sequence
cgaggggtttgctgtggaataaaattagattccaacatctgccaccatta

SEQ ID NO: 2751 - DNA, 50 bp, Unknown
  Description of Unknown: Rat/Human CpG sequence
cgggaaggggtcctttggacaggtggccaagtgcttggatcacaaaaaca

SEQ ID NO: 2752 - DNA, 50 bp, Unknown
  Description of Unknown: Rat/Human CpG sequence
tatcagcgtcaactatcgcttcctctgctggtacacacggcctgatgccg

SEQ ID NO: 2753 - DNA, 50 bp, Unknown
  Description of Unknown: Rat/Human CpG sequence
acagtgggcgtattttatggaaagcagccgacaatcagtgtttgcagacg

SEQ ID NO: 2754 - DNA, 50 bp, Unknown
  Description of Unknown: Rat/Human CpG sequence
cgccatttgtcaaagtcaaccttctgattgctttggacctactgctatcc

SEQ ID NO: 2755 - DNA, 50 bp, Unknown
  Description of Unknown: Rat/Human CpG sequence
cgaaatgaaaacttaattcaataataaatgagcttcagagcagcacaaga

SEQ ID NO: 2756 - DNA, 50 bp, Unknown
  Description of Unknown: Rat/Human CpG sequence
aaaaacatttattaatatgcaaattctaagtggcaatctggacccagtcg

SEQ ID NO: 2757 - DNA, 50 bp, Unknown
  Description of Unknown: Rat/Human CpG sequence
cggcgactccgttcaattttggtaacagtctggcaagtgcaggtagatac

SEQ ID NO: 2758 - DNA, 50 bp, Unknown
  Description of Unknown: Rat/Human CpG sequence
agatataaataacattatctgaggagggacattcctgccgggggacatcg

SEQ ID NO: 2759 - DNA, 50 bp, Unknown
  Description of Unknown: Rat/Human CpG sequence
cgaaccaccacaggcctctcactgccagccacgaagccaaagccatatat

SEQ ID NO: 2760 - DNA, 50 bp, Unknown
  Description of Unknown: Rat/Human CpG sequence
cggaattttgtcctggataacacagatcgcaagggtgtccattttctgat

SEQ ID NO: 2761 - DNA, 50 bp, Unknown
  Description of Unknown: Rat/Human CpG sequence
aatatcaaagcaggcaatgcatgtgtggctatgcctcacaaaataggtcg

SEQ ID NO: 2762 - DNA, 50 bp, Unknown
  Description of Unknown: Rat/Human CpG sequence
agttaatttggcatctgtattttttacaaccccgcacacgtagcccaacg

SEQ ID NO: 2763 - DNA, 50 bp, Unknown
  Description of Unknown: Rat/Human CpG sequence
cgctcctggccccggtgattggctgctcagctctgaccccacttgggctg

SEQ ID NO: 2764 - DNA, 50 bp, Unknown
  Description of Unknown: Rat/Human CpG sequence
cgtatctttatttctagcacattaacaaaatatcacaaataaattgtccg

SEQ ID NO: 2765 - DNA, 50 bp, Unknown
  Description of Unknown: Rat/Human CpG sequence
taaactctctcctgtcttggacggggtctctgagcttcgtcacagtttcg

SEQ ID NO: 2766 - DNA, 50 bp, Unknown
  Description of Unknown: Rat/Human CpG sequence
ctgggacagtgtgtgcttgcaggtgtctctcagatacgtgctacctgtcg

SEQ ID NO: 2767 - DNA, 50 bp, Unknown
  Description of Unknown: Rat/Human CpG sequence
agttaccgctctcaaacctaccaaaactacaaaaactttaatagcagacg

SEQ ID NO: 2768 - DNA, 50 bp, Unknown
  Description of Unknown: Rat/Human CpG sequence
ccaatgagatttgaaaatggccttgagccgcagcctcctctcgggtcacg

SEQ ID NO: 2769 - DNA, 50 bp, Unknown
  Description of Unknown: Rat/Human CpG sequence
cgccattaagtcccgatagacaataccagagtggttttctttcaactgtg

SEQ ID NO: 2770 - DNA, 50 bp, Unknown
  Description of Unknown: Rat/Human CpG sequence
tccaagaagtacaacatcctgggtaccaatgccatcatggataagatgcg

SEQ ID NO: 2771 - DNA, 50 bp, Unknown
  Description of Unknown: Rat/Human CpG sequence
cgcgggagaccaaggtaatgatgatgtcatgagaaatctcaagtacatgg

SEQ ID NO: 2772 - DNA, 50 bp, Unknown
  Description of Unknown: Rat/Human CpG sequence
cgcgcggggacctaatccatcaaattgtctacaaattgtgaagaaaattc

SEQ ID NO: 2773 - DNA, 50 bp, Unknown
  Description of Unknown: Rat/Human CpG sequence
tgtgttacagagtacagttgctgtgttgcagaatgttaaaaacctcaacg

SEQ ID NO: 2774 - DNA, 50 bp, Unknown
  Description of Unknown: Rat/Human CpG sequence
cgtccggtctgaagtttctccgagtaaacaaggatgagggacaaaagcca

SEQ ID NO: 2775 - DNA, 50 bp, Unknown
  Description of Unknown: Rat/Human CpG sequence
cggcattgtggttcatgtttgaaattacagattttaaatgccatgttcat

SEQ ID NO: 2776 - DNA, 50 bp, Unknown
  Description of Unknown: Rat/Human CpG sequence
aaccatgtaggccctgcaaaggctaccagtccatctctccgtcttcgtcg

SEQ ID NO: 2777 - DNA, 50 bp, Unknown
  Description of Unknown: Rat/Human CpG sequence
gactgttagcaatcagaatgctttttatatggtgtctttctttggaaacg

SEQ ID NO: 2778 - DNA, 50 bp, Unknown
  Description of Unknown: Rat/Human CpG sequence
gagcccagtgggaggtggagcgggcggagctgcaggtaaagaccctcccg

SEQ ID NO: 2779 - DNA, 50 bp, Unknown
  Description of Unknown: Rat/Human CpG sequence
actttgagacatggcttgataacatttctgttacatttctttctctgacg

SEQ ID NO: 2780 - DNA, 50 bp, Unknown
  Description of Unknown: Rat/Human CpG sequence
cggctaataagttgtctgacaagatagccactttgtacctaattgttcag

SEQ ID NO: 2781 - DNA, 50 bp, Unknown
  Description of Unknown: Rat/Human CpG sequence
cgcacggacatcctgtgcaacctgcccagctacaaggccaaggtgagaga

SEQ ID NO: 2782 - DNA, 50 bp, Unknown; identical to SEQ ID NO: 255
  Description of Unknown: Rat/Human CpG sequence

SEQ ID NO: 2783 - DNA, 50 bp, Unknown
  Description of Unknown: Rat/Human CpG sequence
cgacctggagacagcttttgtgttatcctgtcaatggttatagaaggata

SEQ ID NO: 2784 - DNA, 50 bp, Unknown
  Description of Unknown: Rat/Human CpG sequence
actcgtgacgtctccaagtcctataggtgcagcggctggtgagatagtcg

SEQ ID NO: 2785 - DNA, 50 bp, Unknown
  Description of Unknown: Rat/Human CpG sequence
ttaataagaatctgggaagtatctgtctttgccggccgctttcatttgcg

SEQ ID NO: 2786 - DNA, 50 bp, Unknown
  Description of Unknown: Rat/Human CpG sequence
tctggatcaacctgggcactacgaggggttgaatttctaccattatcgcg

SEQ ID NO: 2787 - DNA, 50 bp, Unknown
  Description of Unknown: Rat/Human CpG sequence
actatatccgtgcatctttttaagcagatgaggtccagcgtgctccagcg

SEQ ID NO: 2788 - DNA, 50 bp, Unknown
  Description of Unknown: Rat/Human CpG sequence
cgccttaaaaatacgaaaataaattttacaaggtttctgttttgtgtgga

SEQ ID NO: 2789 - DNA, 50 bp, Unknown
  Description of Unknown: Rat/Human CpG sequence
cggccctggaggaattcccagtgtaaacagggaattctctaagggaaccc

SEQ ID NO: 2790 - DNA, 50 bp, Unknown
  Description of Unknown: Rat/Human CpG sequence
tctctgacagatgtgtgcccaatcactgtgagcatggtggaaagtgctcg

SEQ ID NO: 2791 - DNA, 50 bp, Unknown
  Description of Unknown: Rat/Human CpG sequence
gagatggcggatccagccgaatgcagcatcaaagtgatgtgccggttccg

SEQ ID NO: 2792 - DNA, 50 bp, Unknown
  Description of Unknown: Rat/Human CpG sequence
cggaaagtaattaaggaaaacaagtttgaaactgctgacttcaacccttt

SEQ ID NO: 2793 - DNA, 50 bp, Unknown
  Description of Unknown: Rat/Human CpG sequence
acttaaaactggggtcaggtggaagtctcacagagaccacgtctgtaccg

SEQ ID NO: 2794 - DNA, 50 bp, Unknown
  Description of Unknown: Rat/Human CpG sequence
tgcatcttcccttattgaaaggttattttatgcaagtaaacaattcatcg

SEQ ID NO: 2795 - DNA, 50 bp, Unknown
  Description of Unknown: Rat/Human CpG sequence
caagtttacttcatgactctgaaccgtaactgcatcatgaactggtgacg

SEQ ID NO: 2796 - DNA, 50 bp, Unknown
  Description of Unknown: Rat/Human CpG sequence
tcaccaaagtccagtagctgcttcatggacagcggggacgggctgtagcg

SEQ ID NO: 2797 - DNA, 50 bp, Unknown
  Description of Unknown: Rat/Human CpG sequence
cgcagttttgaagaagtatcaaagtaggagaagagtgaatctagctcatc

SEQ ID NO: 2798 - DNA, 50 bp, Unknown
  Description of Unknown: Rat/Human CpG sequence
cgcaaagggggagaatcacccgtctcctaattttaaccagtacgtgaggg

SEQ ID NO: 2799 - DNA, 50 bp, Unknown
  Description of Unknown: Rat/Human CpG sequence
tatcactttctcttcttaaagcaaagagcaaatcgcctgtaaaatctacg

SEQ ID NO: 2800 - DNA, 50 bp, Unknown
  Description of Unknown: Rat/Human CpG sequence
catatgtccaagcctgcggtgctgggactgagcatgattataccccgacg

SEQ ID NO: 2801 - DNA, 50 bp, Unknown
  Description of Unknown: Rat/Human CpG sequence
gggcggtgcagcatgcggcaaagctctttgcataaattatgctcatgacg

SEQ ID NO: 2802 - DNA, 50 bp, Unknown
  Description of Unknown: Rat/Human CpG sequence
gcccaccggtggggacagtgtggcatttcttatgctccagcagctgttcg

SEQ ID NO: 2803 - DNA, 50 bp, Unknown
  Description of Unknown: Rat/Human CpG sequence
cctcttgtctcgacaactgtagatattttgttttccttctttctctctcg

SEQ ID NO: 2804 - DNA, 50 bp, Unknown
  Description of Unknown: Rat/Human CpG sequence
cgcagcacaaggcaattttaaaatccattctgtaaaagcaacactgtttg

SEQ ID NO: 2805 - DNA, 50 bp, Unknown
  Description of Unknown: Rat/Human CpG sequence
aatgtaaaatcccatatgctgttatacagtatgttgcaatctgttttacg

SEQ ID NO: 2806 - DNA, 50 bp, Unknown
  Description of Unknown: Rat/Human CpG sequence
gaaagccctacggcgcactgcaatgtgctgaactgggagcaagtgcagcg

SEQ ID NO: 2807 - DNA, 50 bp, Unknown
  Description of Unknown: Rat/Human CpG sequence
cgcatgtcagagaggttgcaggctgttttcaatttgtcagtttgtggatg

SEQ ID NO: 2808 - DNA, 50 bp, Unknown
  Description of Unknown: Rat/Human CpG sequence
gcaggaggcagctgcatatctgcggtcccgaccacaattgctgggagtcg

SEQ ID NO: 2809 - DNA, 50 bp, Unknown
  Description of Unknown: Rat/Human CpG sequence
tctggctctgactttcactccggggcaacagtagcaccaaaccacatacg

SEQ ID NO: 2810 - DNA, 50 bp, Unknown
  Description of Unknown: Rat/Human CpG sequence
agggctctgattcagaaagatcatcggatccgtctgagcttggctggtcg

SEQ ID NO: 2811 - DNA, 50 bp, Unknown
  Description of Unknown: Rat/Human CpG sequence
cgtgtttatagtacagtaagtggtctagcaaaattgtccatgtttctttg

SEQ ID NO: 2812 - DNA, 50 bp, Unknown
  Description of Unknown: Rat/Human CpG sequence
cgcgccggagcgtgactttacaactaatcctgtttgtaagttattattta

SEQ ID NO: 2813 - DNA, 50 bp, Unknown
  Description of Unknown: Rat/Human CpG sequence
cggggctggctctgggcctcagacactctggaatcgccaaggtctgagct

SEQ ID NO: 2814 - DNA, 50 bp, Unknown
  Description of Unknown: Rat/Human CpG sequence
cgcccttttcaggcgcagacaacagaacaaagtatagaggaacaacaaaa

SEQ ID NO: 2815 - DNA, 50 bp, Unknown
  Description of Unknown: Rat/Human CpG sequence
cgccagcagctgcaacttgggcggcatcataatcctgaggagccccatga

SEQ ID NO: 2816 - DNA, 50 bp, Unknown
  Description of Unknown: Rat/Human CpG sequence
agtggtaaccatccaccacttgagtcatctcgggtcatcaccacagctcg

SEQ ID NO: 2817 - DNA, 50 bp, Unknown
  Description of Unknown: Rat/Human CpG sequence
gtattcgatttgtttgagtcccttataaaaacactaatgcagaccagacg

SEQ ID NO: 2818 - DNA, 50 bp, Unknown
  Description of Unknown: Rat/Human CpG sequence
cgggtgaagtgtaatttgtttttcttaagtttaatacagcatgtcaatag

SEQ ID NO: 2819 - DNA, 50 bp, Unknown
  Description of Unknown: Rat/Human CpG sequence
cgccaatcgatttacctccaatgcaggtgtgctacaaatccgctgggccc

SEQ ID NO: 2820 - DNA, 50 bp, Unknown
  Description of Unknown: Rat/Human CpG sequence
gaggatacctcaggcactgagaatgaggcctactccgtgggcactggccg

SEQ ID NO: 2821 - DNA, 50 bp, Unknown
  Description of Unknown: Rat/Human CpG sequence
cgcgcagaagctctttgcgcacagacatctctccaaggtgacccatttgg

SEQ ID NO: 2822 - DNA, 50 bp, Unknown
  Description of Unknown: Rat/Human CpG sequence
gaatgagaaatgtttatatgttcttagttgcttttaaatctcccttcacg

SEQ ID NO: 2823 - DNA, 50 bp, Unknown
  Description of Unknown: Rat/Human CpG sequence
aaacttctgaacttttgagcatccgtcacccaggcgaggacttttttacg

SEQ ID NO: 2824 - DNA, 50 bp, Unknown
  Description of Unknown: Rat/Human CpG sequence
ctgcatcttgatcctcctgtacgccatgtacaagtacaggaacagggacg

SEQ ID NO: 2825 - DNA, 50 bp, Unknown
  Description of Unknown: Rat/Human CpG sequence
atgcattatacagcttgctgtctacattgatcaaattaatcagaaaatcg

SEQ ID NO: 2826 - DNA, 50 bp, Unknown
  Description of Unknown: Rat/Human CpG sequence
ctggcatggctgtgagcagaccctggctcgcctaagaaatgccgtgctcg

SEQ ID NO: 2827 - DNA, 50 bp, Unknown
  Description of Unknown: Rat/Human CpG sequence
cggcattcggcaacagctgtcacctgctataatgttctttaattatctta

SEQ ID NO: 2828 - DNA, 50 bp, Unknown
  Description of Unknown: Rat/Human CpG sequence
cgggctgcatcagcactcaaatcttatcttgttaaatcagacaaatgtag

SEQ ID NO: 2829 - DNA, 50 bp, Unknown
  Description of Unknown: Rat/Human CpG sequence
cgcagacaatgtcctctgtgctgtatttgccaatgaaagtggacaacaac

SEQ ID NO: 2830 - DNA, 50 bp, Unknown
  Description of Unknown: Rat/Human CpG sequence
gggctccatagctcaggggttagagcgctggtcttgtaaaccaggggtcg

SEQ ID NO: 2831 - DNA, 50 bp, Unknown
  Description of Unknown: Rat/Human CpG sequence
tgctgcgttatcagcctattgatcatgtgtcgcctgtaataggacaggcg

SEQ ID NO: 2832 - DNA, 50 bp, Unknown
  Description of Unknown: Rat/Human CpG sequence
cggcggcgtggggttcgctgtgtgacacaattacaacaactttgtgctgg

SEQ ID NO: 2833 - DNA, 50 bp, Unknown
  Description of Unknown: Rat/Human CpG sequence
catcaaattcatttacgaggtcctccatggacttgaagctgattatttcg

SEQ ID NO: 2834 - DNA, 50 bp, Unknown
  Description of Unknown: Rat/Human CpG sequence
taaaatccattctgtaaaagcaacactgtttgcagagtttgaagagctcg

SEQ ID NO: 2835 - DNA, 50 bp, Unknown
  Description of Unknown: Rat/Human CpG sequence
tttcgttttcaatagttatggtaacagcatttctcccaagcacatctacg

SEQ ID NO: 2836 - DNA, 50 bp, Unknown
  Description of Unknown: Rat/Human CpG sequence
gtgctcgttgaggctcatcacctcggagtaactctggccgatccagtccg

SEQ ID NO: 2837 - DNA, 50 bp, Unknown
  Description of Unknown: Rat/Human CpG sequence
cggcgtgtgaataattacaaagtagcaagtatttttacatacagcaaata

SEQ ID NO: 2838 - DNA, 50 bp, Unknown
  Description of Unknown: Rat/Human CpG sequence
ttctctgcagaatgtcaaacaaagatcgacacattgattccagctgttcg

SEQ ID NO: 2839 - DNA, 50 bp, Unknown
  Description of Unknown: Rat/Human CpG sequence
cggcaaggggagtttgttgttgccatgggaagtccctttgcactgcagaa

SEQ ID NO: 2840 - DNA, 50 bp, Unknown
  Description of Unknown: Rat/Human CpG sequence
cgccaaatgtctatgttcttgcgctgggctttcgagaaatggtcccaagc

SEQ ID NO: 2841 - DNA, 50 bp, Unknown
  Description of Unknown: Rat/Human CpG sequence
cgctggggtgatttctagcatactttatcatgtatcaatatatactctgt

SEQ ID NO: 2842 - DNA, 50 bp, Unknown
  Description of Unknown: Rat/Human CpG sequence
cgcagctgcatggacagcacggtgaagtacatgaatttctacaagatccc

SEQ ID NO: 2843 - DNA, 50 bp, Unknown
  Description of Unknown: Rat/Human CpG sequence
cgcttgtggcaaaatagaggtaaccttgttgcaatgctttataagttggt

SEQ ID NO: 2844 - DNA, 50 bp, Unknown
  Description of Unknown: Rat/Human CpG sequence
tttgggaggtgattaacagcaatcacgcttgagtttgacatccaggcacg

SEQ ID NO: 2845 - DNA, 50 bp, Unknown
  Description of Unknown: Rat/Human CpG sequence
ttttctcttcttgtaatcgctccaccaactgctgaggaatatcatggtcg

SEQ ID NO: 2846 - DNA, 50 bp, Unknown
  Description of Unknown: Rat/Human CpG sequence
cgtgatcaggaaaaaggaaatgaaaccagagacagagggaagctgagcga

SEQ ID NO: 2847 - DNA, 50 bp, Unknown
  Description of Unknown: Rat/Human CpG sequence
gatttttctttatcctcattaaagatcccaggtgcagacaaagctttacg

SEQ ID NO: 2848 - DNA, 50 bp, Unknown
  Description of Unknown: Rat/Human CpG sequence
aacagcactttcctaaactattgtatttattagcaacctgttgcccttcg

SEQ ID NO: 2849 - DNA, 50 bp, Unknown
  Description of Unknown: Rat/Human CpG sequence
tagagtcaatcaattatgaagggaacaatctggcggcccctcggggagcg

SEQ ID NO: 2850 - DNA, 50 bp, Unknown
  Description of Unknown: Rat/Human CpG sequence
cggtgcgtaatggtgtggtattaaattctaattagagatgcaggaatcaa

SEQ ID NO: 2851 - DNA, 50 bp, Unknown
  Description of Unknown: Rat/Human CpG sequence
cgtgatttaatggctaatcttacactgccccctggtgggcgtccatagac

SEQ ID NO: 2852 - DNA, 50 bp, Unknown
  Description of Unknown: Rat/Human CpG sequence
cgctgaagtcagtggtgttaaacaccagctgtgctggcagagaagcgtgg

SEQ ID NO: 2853 - DNA, 50 bp, Unknown
  Description of Unknown: Rat/Human CpG sequence
tcgatgaccaggtcgatgggcatctttcccttgaggcaggtgatgtagcg

SEQ ID NO: 2854 - DNA, 50 bp, Unknown
  Description of Unknown: Rat/Human CpG sequence
cgcttcttttttcctatcttttcttttttccccactttttcttctctgcg

SEQ ID NO: 2855 - DNA, 50 bp, Unknown
  Description of Unknown: Rat/Human CpG sequence
cgctgcgacatctgccagatgcccttcagcgtctacagcaccctggagaa

SEQ ID NO: 2856 - DNA, 50 bp, Unknown
  Description of Unknown: Rat/Human CpG sequence
cgcctctgcttcaatgtgggccgggagctgtacttctatatctacaaggg

SEQ ID NO: 2857 - DNA, 50 bp, Unknown
  Description of Unknown: Rat/Human CpG sequence
cgcgtggggctcagagcaacaggtgggagtttcagaagcattctggtttc

SEQ ID NO: 2858 - DNA, 50 bp, Unknown
  Description of Unknown: Rat/Human CpG sequence
cgatcacacttgctatgaaagtggccacataccaaatcatagtactaccg

SEQ ID NO: 2859 - DNA, 50 bp, Unknown
  Description of Unknown: Rat/Human CpG sequence
cgccaacacatggcacccccagcccctgccacgcccagcaagagcagcgc

SEQ ID NO: 2860 - DNA, 50 bp, Unknown
  Description of Unknown: Rat/Human CpG sequence
cgagcatttagacacaagcgagaggatcatggcggatggccccaggtgta

SEQ ID NO: 2861 - DNA, 50 bp, Unknown
  Description of Unknown: Rat/Human CpG sequence
cggctcttgctgctcattggggaggtgacacaagtgggtgatagtggctt

SEQ ID NO: 2862 - DNA, 50 bp, Unknown
  Description of Unknown: Rat/Human CpG sequence
tacgccaaaacccacatgatctgtaacgtcagcatgcgtatttgcatacg

SEQ ID NO: 2863 - DNA, 50 bp, Unknown
  Description of Unknown: Rat/Human CpG sequence
ttttatgtaccgagtctcttatccgtctctcctaatgacttcccttagcg

SEQ ID NO: 2864 - DNA, 50 bp, Unknown
  Description of Unknown: Rat/Human CpG sequence
atatcaagaggatggattcgacttagacttgacctgtatccatttctgcg

SEQ ID NO: 2865 - DNA, 50 bp, Unknown
  Description of Unknown: Rat/Human CpG sequence
gtcaaactcgaggtctgggttcttgcagatcatgcccggcatggtggacg

SEQ ID NO: 2866 - DNA, 50 bp, Unknown
  Description of Unknown: Rat/Human CpG sequence
cactggagccctgcctcttcctggcagggagcatcgagtacagctgtccg

SEQ ID NO: 2867 - DNA, 50 bp, Unknown
  Description of Unknown: Rat/Human CpG sequence
cggttgatgtggttagctaactgccctgggccctgtattggttttgctca

SEQ ID NO: 2868 - DNA, 50 bp, Unknown
  Description of Unknown: Rat/Human CpG sequence
cggctagagcaatttgtcatagaatctggggggctcatttttccggccaa

SEQ ID NO: 2869 - DNA, 50 bp, Unknown
  Description of Unknown: Rat/Human CpG sequence
cgccgccgccgccgccgcactataattttccaaacaggatcttgcaatca

SEQ ID NO: 2870 - DNA, 50 bp, Unknown
  Description of Unknown: Rat/Human CpG sequence
cgtccatcagcgacggcggtaattagggctttccaaccccaaatgtgggc

SEQ ID NO: 2871 - DNA, 50 bp, Unknown
  Description of Unknown: Rat/Human CpG sequence
cgctgctggctttgtcttaattaggcactattgatggaaacagggagggc

SEQ ID NO: 2872 - DNA, 50 bp, Unknown
  Description of Unknown: Rat/Human CpG sequence
ggggtattttagtgacgcctggaacacgtttgactccctcatcgtaatcg

SEQ ID NO: 2873 - DNA, 50 bp, Unknown
  Description of Unknown: Rat/Human CpG sequence
ttgtttccaggtcatatttagggttcacatatttgcataaaagcatttcg

SEQ ID NO: 2874 - DNA, 50 bp, Unknown
  Description of Unknown: Rat/Human CpG sequence
cgaaggcgaagccccggctctgacctggagacagcattcagatacagacg

SEQ ID NO: 2875 - DNA, 50 bp, Unknown
  Description of Unknown: Rat/Human CpG sequence
caatttctccctttttaacaccagcataattgactttgtaccatctgccg

SEQ ID NO: 2876 - DNA, 50 bp, Unknown
  Description of Unknown: Rat/Human CpG sequence
gccttgaaattagcgaggtagaatgcttgggctaattatgcattcaaacg

SEQ ID NO: 2877 - DNA, 50 bp, Unknown
  Description of Unknown: Rat/Human CpG sequence
cgaaccactttctggggattaagcgcatggctaagcctactggaccagac

SEQ ID NO: 2878 - DNA, 50 bp, Unknown
  Description of Unknown: Rat/Human CpG sequence
cggttgaggtcactaagcatctggttgatttgggaagtgttctgaagcac

SEQ ID NO: 2879 - DNA, 50 bp, Unknown
  Description of Unknown: Rat/Human CpG sequence
cgccggggccggaatggcacaaagtcctcatcattggggtcatctaccat

SEQ ID NO: 2880 - DNA, 50 bp, Unknown
  Description of Unknown: Rat/Human CpG sequence
ccttctaaagaaccaaagcctgttggcttaaacaataaagagcgtttccg

SEQ ID NO: 2881 - DNA, 50 bp, Unknown
  Description of Unknown: Rat/Human CpG sequence
gcaatacagctactcacgtagctaaaggggccttcatgtccttactttcg

SEQ ID NO: 2882 - DNA, 50 bp, Unknown
  Description of Unknown: Rat/Human CpG sequence
cgccctgagcgtgagcatcatgtgaaaacgtgatcgccaagtttctctct

SEQ ID NO: 2883 - DNA, 50 bp, Unknown
  Description of Unknown: Rat/Human CpG sequence
cgcctcccatggacccttctaactttgtcaccatgatgggcatgggggtg

SEQ ID NO: 2884 - DNA, 50 bp, Unknown
  Description of Unknown: Rat/Human CpG sequence
cggatcctgggagctgtggccaaggtcagagaagccttccaacctcagga

SEQ ID NO: 2885 - DNA, 50 bp, Unknown
  Description of Unknown: Rat/Human CpG sequence
cgtcagcagcaaagtggttcgttacgcctgattggtctaattgctttgaa

SEQ ID NO: 2886 - DNA, 50 bp, Unknown
  Description of Unknown: Rat/Human CpG sequence
cgtctgcgcccacatcgttgctgaccttgcagaggtagtagccactgtct

SEQ ID NO: 2887 - DNA, 50 bp, Unknown
  Description of Unknown: Rat/Human CpG sequence
gggaaccagccacaattggctatattaataaataactttcctcacagtcg

SEQ ID NO: 2888 - DNA, 50 bp, Unknown
  Description of Unknown: Rat/Human CpG sequence
cggttcactcaagtaaagcagtttgtatggtaattaagggagcatttttc

SEQ ID NO: 2889 - DNA, 50 bp, Unknown
  Description of Unknown: Rat/Human CpG sequence
cgggcatatgaccacagtatcacaatcaagaaattttaagacaacattaa

SEQ ID NO: 2890 - DNA, 50 bp, Unknown
  Description of Unknown: Rat/Human CpG sequence
cgtgctgctgctgctgcaggccatcctgggctccatggtgaacgccttca

SEQ ID NO: 2891 - DNA, 50 bp, Unknown
  Description of Unknown: Rat/Human CpG sequence
acatttaaacaaagtgacacagatcatcagcagatcaactgggaatgacg

SEQ ID NO: 2892 - DNA, 50 bp, Unknown
  Description of Unknown: Rat/Human CpG sequence
cggcatatggagattatatacttttttgaatatcgtttcccaaagcctgc

SEQ ID NO: 2893 - DNA, 50 bp, Unknown
  Description of Unknown: Rat/Human CpG sequence
aataaagcaaattattcccgtcttcagaaacgatctagactaattagtcg

SEQ ID NO: 2894 - DNA, 50 bp, Unknown
  Description of Unknown: Rat/Human CpG sequence
cgcagcaacaatagcagaggaacagctctgcctggtgacgtaatggctgg

SEQ ID NO: 2895 - DNA, 50 bp, Unknown
  Description of Unknown: Rat/Human CpG sequence
cgacagaactgatattttatattgaaatggatcctccaggtacttgggag

SEQ ID NO: 2896 - DNA, 50 bp, Unknown
  Description of Unknown: Rat/Human CpG sequence
agtcaagggaaacctcattagagaggattttcttagttagcagggcttcg

SEQ ID NO: 2897 - DNA, 50 bp, Unknown
  Description of Unknown: Rat/Human CpG sequence
cacagtgatgcacaaagaggtaacttctgtaaggctctctgatataaacg

SEQ ID NO: 2898 - DNA, 50 bp, Unknown
  Description of Unknown: Rat/Human CpG sequence
cggcagcggcgatggctacagaaggagggaaaacctctgagccagagaat

SEQ ID NO: 2899 - DNA, 50 bp, Unknown
  Description of Unknown: Rat/Human CpG sequence
gaaacacttattttcggaattttatagctcagccacaaaaattcactccg

SEQ ID NO: 2900 - DNA, 50 bp, Unknown
  Description of Unknown: Rat/Human CpG sequence
cgtcattgtgctttttgttaaattattggaacagtttgggctgattgaag

SEQ ID NO: 2901 - DNA, 50 bp, Unknown
  Description of Unknown: Rat/Human CpG sequence
cggcccttatggcgggctgtcaaactgttttggcttccccgttattactt

SEQ ID NO: 2902 - DNA, 50 bp, Unknown
  Description of Unknown: Rat/Human CpG sequence
cgcgggcaggcagagaagcaccacacaagaaattgattccattaaaaagt

SEQ ID NO: 2903 - DNA, 50 bp, Unknown
  Description of Unknown: Rat/Human CpG sequence
gggaaatatatatttatatagatactctaatatagaccacatctcacccg

SEQ ID NO: 2904 - DNA, 50 bp, Unknown
  Description of Unknown: Rat/Human CpG sequence
ttacctgggaaacctctgcttcagcttcctcaggctctgcctggtaggcg

SEQ ID NO: 2905 - DNA, 50 bp, Unknown
  Description of Unknown: Rat/Human CpG sequence
cgggcccaaatcttacaggcttgtgttggctttgaccaatgaagtagaac

SEQ ID NO: 2906 - DNA, 50 bp, Unknown
  Description of Unknown: Rat/Human CpG sequence
cgcttcagggattgactaaaacctgttcatgtatagcagcaatttgagat

SEQ ID NO: 2907 - DNA, 50 bp, Unknown
  Description of Unknown: Rat/Human CpG sequence
tggcattgagctgggcactcatgactcgctcatgatgtgaatggctatcg

SEQ ID NO: 2908 - DNA, 50 bp, Unknown
  Description of Unknown: Rat/Human CpG sequence
cggctcagctaaatgcgtgctgagtgcttcagccttaaatagggagaaaa

SEQ ID NO: 2909 - DNA, 50 bp, Unknown
  Description of Unknown: Rat/Human CpG sequence
cgccttcgagattgggctttatgcccttggcctgcacaactttgtttctc

SEQ ID NO: 2910 - DNA, 50 bp, Unknown
  Description of Unknown: Rat/Human CpG sequence
cgctgcgagctgagccccttgcccaccaggaagtgcacgtcgcacagcac

SEQ ID NO: 2911 - DNA, 50 bp, Unknown
  Description of Unknown: Rat/Human CpG sequence
cgcattataaaaatatgcaccagttgccaacatgtaatgaaatattaaga

SEQ ID NO: 2912 - DNA, 50 bp, Unknown
  Description of Unknown: Rat/Universal CpG sequence
cgagtgtccggctttttgaatgagccacgtgttcaaactacaaatcaacg

SEQ ID NO: 2913 - DNA, 50 bp, Unknown
  Description of Unknown: Rat/Universal CpG sequence
aaacatgaatgaatgtggagggcggagcctgggaaaacccctctgcaacg

SEQ ID NO: 2914 - DNA, 50 bp, Rattus norvegicus
cgtgctttcggtgagaacaccgagtgacgatctgttgcttcccctgaggt

SEQ ID NO: 2915 - DNA, 50 bp, Rattus norvegicus
cggtctctctatggctggggctgcctctgtacaatgggataaaattcaag

SEQ ID NO: 2916 - DNA, 50 bp, Rattus norvegicus
cgctggatattagtagatgaggatcattctgcttcaattgggcgcctctc

SEQ ID NO: 2917 - DNA, 50 bp, Rattus norvegicus
agaggttagttctattaagagttcatcaatcacccggtgtgcacttttcg

SEQ ID NO: 2918 - DNA, 50 bp, Rattus norvegicus
gcagctgaaggcgccccattagcataacactgatgtttaattttcatacg

SEQ ID NO: 2919 - DNA, 50 bp, Rattus norvegicus
cggcaaaagtgtggagaagatttaagcaaatgactgtgtcagcttctatt

SEQ ID NO: 2920 - DNA, 50 bp, Rattus norvegicus
cgccacgatgatgtccatgaacagcaagcagcctcactttgccatgcatc

SEQ ID NO: 2921 - DNA, 50 bp, Rattus norvegicus
aatcaattatttgacactaagatactctcaagaaaaactcatcagttacg

SEQ ID NO: 2922 - DNA, 50 bp, Rattus norvegicus
cgcttgttgtccacagtcaaggaggtgccctcgggcagctcggccggctc

SEQ ID NO: 2923 - DNA, 50 bp, Rattus norvegicus
cgtctatttcatgaggtagtttgcatgtccttgaatggaatctcgttacc

SEQ ID NO: 2924 - DNA, 50 bp, Rattus norvegicus
cgccaggagtgtctcaaggagcagatgggtgctactttgtttataaaaga

SEQ ID NO: 2925 - DNA, 50 bp, Rattus norvegicus
gactggccatttacgccaccactttaaacaaagatatttggttattcccg

SEQ ID NO: 2926 - DNA, 50 bp, Rattus norvegicus
agggtgggaagcacatgggccacttttatgtaacactcctctgatacacg

SEQ ID NO: 2927 - DNA, 50 bp, Rattus norvegicus
ttactggtgatcgctgccaaaactacgtaatggccagcttctacagtacg

SEQ ID NO: 2928 - DNA, 50 bp, Rattus norvegicus
tgcagtgaatttatggcggccatccattagctcttaccaaggcaacgtcg

SEQ ID NO: 2929 - DNA, 50 bp, Rattus norvegicus
agcaggccttcctggtcagcctctacaagttcatgaaggagcgacacacg

SEQ ID NO: 2930 - DNA, 50 bp, Rattus norvegicus
tcacgggattatattgttcgttgagtagcagctttctgtcccagctgtcg

SEQ ID NO: 2931 - DNA, 50 bp, Rattus norvegicus
cgccagaaagagtcactaattatgatatgtatttgcatatgtttaatcac

SEQ ID NO: 2932 - DNA, 50 bp, Rattus norvegicus
cgtgataaaacattgattgttgcagtttggtgacccatgaaatttggggg

SEQ ID NO: 2933 - DNA, 50 bp, Rattus norvegicus
tctactcaatggattgtggtcaaggccattgtaacgtgagcagtgcctcg

SEQ ID NO: 2934 - DNA, 50 bp, Rattus norvegicus
cgcattgtttatccctatgaaatgtaccagtctggagccaaccttgtggt

SEQ ID NO: 2935 - DNA, 50 bp, Rattus norvegicus
gcaggcggggctggtacttgtgcaaggactgtaaaaccaccatctgtccg

SEQ ID NO: 2936 - DNA, 50 bp, Rattus norvegicus
aatttaaattgcttttgttcattttccatactactccccacacttcatcg

SEQ ID NO: 2937 - DNA, 50 bp, Rattus norvegicus
cgcctctctggtgatctgcacttaataggaatattttaaactatgtagct

SEQ ID NO: 2938 - DNA, 50 bp, Rattus norvegicus
cgcctaaatcattgttacacactaattagtgctgtactctgatttgaggc

SEQ ID NO: 2939 - DNA, 50 bp, Rattus norvegicus
cggattctatttgcatccggaatcgcatgtacatgaaaaatgtgtccgcg

SEQ ID NO: 2940 - DNA, 50 bp, Rattus norvegicus
ggcttcttcttcttggggggcgtccggttctgataggggtgacctatacg

SEQ ID NO: 2941 - DNA, 50 bp, Rattus norvegicus
ttccaccacaattgtagctccctctccggctttgaagtgccgcggaggcg

SEQ ID NO: 2942 - DNA, 50 bp, Rattus norvegicus
tgaataaaaggaattaaccgtttccctcctctgacctctgggaatttccg

SEQ ID NO: 2943 - DNA, 50 bp, Rattus norvegicus
cggcggctcgtgctggcatctacggggatacgcatcacaacaagccgatt

SEQ ID NO: 2944 - DNA, 50 bp, Rattus norvegicus
cggggggattgctaatcgtattcagcatgttttgcacaagaaatgtcagc

SEQ ID NO: 2945 - DNA, 50 bp, Rattus norvegicus
cgcttcatgtcaactacaatggcactgaatgaacaggtttcagctttata

SEQ ID NO: 2946 - DNA, 50 bp, Rattus norvegicus
tcccatctcgggcactaaatgatccccaccatttgcagtaaatatatacg

SEQ ID NO: 2947 - DNA, 50 bp, Rattus norvegicus
cggaaagtgttttggttttccttggacctcgaagaagctatagagttcaa

SEQ ID NO: 2948 - DNA, 50 bp, Rattus norvegicus
cgccctaatgggacaagctcgctcccagaggagtgacaattcctcctaat

SEQ ID NO: 2949 - DNA, 50 bp, Rattus norvegicus
cgtcctctacctccaccaggaccagaaagggccagcaatctggcttggat

SEQ ID NO: 2950 - DNA, 50 bp, Rattus norvegicus
cgcagagacgacactgcatgttagggggaccccaagaataccactggtaa

SEQ ID NO: 2951 - DNA, 50 bp, Rattus norvegicus
accaggaggtatttactgcttcctggacaaaggtcaggtccaaaaacacg

SEQ ID NO: 2952 - DNA, 50 bp, Rattus norvegicus
cgagcttgtaaatacaagctccgtggacaaagtcccaaatgacatcactg

SEQ ID NO: 2953 - DNA, 50 bp, Rattus norvegicus
cggagagctgcaagccggtgcagcagccttcagcttttggcagcatgaaa

SEQ ID NO: 2954 - DNA, 50 bp, Rattus norvegicus
cgtgtgagaaaagcctgggaacaaacggggcgcctccgtctccaagagct

SEQ ID NO: 2955 - DNA, 50 bp, Rattus norvegicus
cggagtgattgtaagtaacgcttgccttaagaatctcattattggaacac

SEQ ID NO: 2956 - DNA, 50 bp, Rattus norvegicus
agctgtgggtgctgatctggctgtactcgcagtctttcatgggcccgccg

SEQ ID NO: 2957 - DNA, 50 bp, Rattus norvegicus
cgggaagaggactcctttgacagtgatagcacagccaccttgctcaagtg

SEQ ID NO: 2958 - DNA, 50 bp, Rattus norvegicus
cggtcccagaagtactgcacagcaatggcaatgccccggctggagaagta

SEQ ID NO: 2959 - DNA, 50 bp, Rattus norvegicus
cttgagttcttgggagctggtggccagcatacttcgaatgcttttgtccg

SEQ ID NO: 2960 - DNA, 50 bp, Rattus norvegicus
cggcgctgtggctcctccagataaagcagcgatttcagcccaaatgtttc

SEQ ID NO: 2961 - DNA, 50 bp, Rattus norvegicus
tcaagacggcgccaggcagctcagtgttcgcagacagctgtggcgcgacg

SEQ ID NO: 2962 - DNA, 50 bp, Rattus norvegicus
atttcacttggggaacttcaactctgagccacaggacagaataaaactcg

SEQ ID NO: 2963 - DNA, 50 bp, Rattus norvegicus
tcttcctttattgtgcagtaaatttccctccagagttcggatttcatgcg

SEQ ID NO: 2964 - DNA, 50 bp, Rattus norvegicus
cggcatatttgctgcttggctagccaaatagaagttgttttttgcacaaa

SEQ ID NO: 2965 - DNA, 50 bp, Rattus norvegicus
cgagaacaagcccatgatcctgctggtgggccagtacagcaccggcaaga

SEQ ID NO: 2966 - DNA, 50 bp, Rattus norvegicus
gtccagagaagtaaactctctcctgtcttggacggggtctctgagcttcg

SEQ ID NO: 2967 - DNA, 50 bp, Rattus norvegicus
cgcaagggcagggaccccccacgagattcatgcagcattcaaagtgagtg

SEQ ID NO: 2968 - DNA, 50 bp, Rattus norvegicus
cattcaatttccttaatttatccttgagtttattgctgcttttgaagtcg

SEQ ID NO: 2969 - DNA, 50 bp, Rattus norvegicus
tgagattccattttcacattggtttgtgctgagcatataaatttcctgcg

SEQ ID NO: 2970 - DNA, 50 bp, Rattus norvegicus
ctgaccatttagatttcagagggatccaaaaccaatttagactccagtcg

SEQ ID NO: 2971 - DNA, 50 bp, Rattus norvegicus
tagcagcacacacggcattttctcattctcacctgccaatgtcatctccg

SEQ ID NO: 2972 - DNA, 50 bp, Rattus norvegicus
gcttccagttggtgcaggccaccttgggcacgtagcagtagatgagctcg

SEQ ID NO: 2973 - DNA, 50 bp, Rattus norvegicus
atgggccaggtctccagcttcctcgctcccatccaatgatttattactcg

SEQ ID NO: 2974 - DNA, 50 bp, Rattus norvegicus
tggaagcggtgagatatgtaatgctttattaagcggtctcagctacaacg

SEQ ID NO: 2975 - DNA, 50 bp, Rattus norvegicus
attcatttccttgggagcactgcaatcctgcaaacacaatgtcaagttcg

SEQ ID NO: 2976 - DNA, 50 bp, Rattus norvegicus
gtttgccatatcagttgcatttgtctttggtacaaaaaataaaacaatcg

SEQ ID NO: 2977 - DNA, 50 bp, Rattus norvegicus
atcaccggggccaggagcgattaggaattccaaaaagctggcagctcccg

SEQ ID NO: 2978 - DNA, 50 bp, Rattus norvegicus
agcttggcacgcagacaccggacgagagagactgcagcaagggtttcacg

SEQ ID NO: 2979 - DNA, 50 bp, Rattus norvegicus
ctcttttttctccttttccccctgcctggaaaaatggctaggtatctacg

SEQ ID NO: 2980 - DNA, 50 bp, Rattus norvegicus
gaggtaactgaggactctgatgaagactttatacagccccgcagaaaacg

SEQ ID NO: 2981 - DNA, 50 bp, Rattus norvegicus
cggctgggtttgtatttgctgttttaatacaaaccccgccgcactgccta

SEQ ID NO: 2982 - DNA, 50 bp, Rattus norvegicus
cggccttattctattagataagatgtgttaattaccctgatggcaatatg

SEQ ID NO: 2983 - DNA, 50 bp, Rattus norvegicus
cggaagagcgcttctccaaattgaaatatagcagagtttacactcctgat

SEQ ID NO: 2984 - DNA, 50 bp, Rattus norvegicus
acataataatgacatatgcaggaaatgcaccattatttatacatgtgacg

SEQ ID NO: 2985 - DNA, 50 bp, Rattus norvegicus
tatggtgttttggttggcatggtgacccattcttcctcattaaactaacg

SEQ ID NO: 2986 - DNA, 50 bp, Rattus norvegicus
cgggtagagtgtaaattacatgtcgccagcataaaatattaaatccaatt

SEQ ID NO: 2987 - DNA, 50 bp, Rattus norvegicus
cgcgggtattttaaaggaaatgagatccgtgtgtttctgatttatttata

SEQ ID NO: 2988 - DNA, 50 bp, Rattus norvegicus
cctagttatttacactctttttcaagcttcgaagctgttataatcattcg

SEQ ID NO: 2989 - DNA, 50 bp, Rattus norvegicus
cgggtaccccagggagtacaaacaccttttatgactcaccaggaacattc

SEQ ID NO: 2990 - DNA, 50 bp, Rattus norvegicus
cggggtccttaatgaccctggcaggccaatgattttgttttgtttgagag

SEQ ID NO: 2991 - DNA, 50 bp, Rattus norvegicus
cgggcaaaattacattcctgtaatggcgtcgctcggggtcccgggaaatt

SEQ ID NO: 2992 - DNA, 50 bp, Rattus norvegicus
cgggctctcgctccgccgctccatgctgctccgactcggagacaaagttc

SEQ ID NO: 2993 - DNA, 50 bp, Rattus norvegicus
cggtggaatctgtttttctgccgccatatggtgtcgacagaatgccactt

SEQ ID NO: 2994 - DNA, 50 bp, Rattus norvegicus
cggcctctactggtgtgtgtttatagaaaatgtttcaataggcagaaaaa

SEQ ID NO: 2995 - DNA, 50 bp, Rattus norvegicus
ctgtaagtggttcaacgtgcgcatggggttcggcttcctgtccatgaccg

SEQ ID NO: 2996 - DNA, 50 bp, Rattus norvegicus
cgccagcacaacaaggacaagccctacaagtgtcccaactgctaccgggc

SEQ ID NO: 2997 - DNA, 50 bp, Rattus norvegicus
cggttctttggaggctcagtttttggtaattaagactaaggagtgtttaa

SEQ ID NO: 2998 - DNA, 50 bp, Rattus norvegicus
cgcggtaacctttgcagatggcgccgctattgctgagaaatggattgctt

SEQ ID NO: 2999 - DNA, 50 bp, Rattus norvegicus
ctcaatcggcttgttgtgatgcgtatccccgtagatgccagcacgagccg

SEQ ID NO: 3000 - DNA, 50 bp, Rattus norvegicus
caaagcagcctcatgcaaagcactgcccatctccgtctggaaagcaaacg

SEQ ID NO: 3001 - DNA, 50 bp, Rattus norvegicus
ccattactgtctcaagagctattctgattaaggctaacatgatgtgatcg

SEQ ID NO: 3002 - DNA, 50 bp, Rattus norvegicus
cggccccaacgatggcttcctggcccagctctgccagctcaatgacagac

SEQ ID NO: 3003 - DNA, 50 bp, Rattus norvegicus
aaatcctttcagctcttcgccaaacccctagtgaaagacaatcaggctcg

SEQ ID NO: 3004 - DNA, 50 bp, Rattus norvegicus
cgggccagcctgcctaaggacaggagccccgaggagtatggaatcaccgt

SEQ ID NO: 3005 - DNA, 50 bp, Rattus norvegicus
gggctgacagtgattggcagtggttgccgtggcaacgccacaacgacacg

SEQ ID NO: 3006 - DNA, 50 bp, Rattus norvegicus
cggatgtcacagcttttccatagaacaattggaagtggagctagtaagta

SEQ ID NO: 3007 - DNA, 50 bp, Rattus norvegicus
cggtgcctgtgtctgggctgtgtgaaccccttcaccatgcaggaggaccg

SEQ ID NO: 3008 - DNA, 50 bp, Rattus norvegicus
gaaaacccagggcactgcgactttgtgaagctgaggacaatgctggtacg

SEQ ID NO: 3009 - DNA, 50 bp, Rattus norvegicus
ttgaaaagctttgtgttaacagccttcaaccaggctccaagaagagtacg

SEQ ID NO: 3010 - DNA, 50 bp, Rattus norvegicus
cgtgtccaggacaaaatcttccgggcacataaggtggtactagcagcttg

SEQ ID NO: 3011 - DNA, 50 bp, Rattus norvegicus
tccaagaaatgcagctaaaattggccctcaaacagcttttgcagagcacg

SEQ ID NO: 3012 - DNA, 50 bp, Rattus norvegicus
tattaaactacatgctttgtcttgtgcaggtgttggcttatggaaagacg

SEQ ID NO: 3013 - DNA, 50 bp, Rattus norvegicus
cggcaggactcgcccattgtgccacccagataattattcaactatgcagc

SEQ ID NO: 3014 - DNA, 50 bp, Rattus norvegicus
gctagttctggccacatactgtcaaattttccagaagaagcatgctgccg

SEQ ID NO: 3015 - DNA, 50 bp, Rattus norvegicus
cgcagctggcatttacacactcagcattaccatatgtatagctgctcggt

SEQ ID NO: 3016 - DNA, 50 bp, Rattus norvegicus
cgccagttttactacctgggccttccccagacgtgtgcctgttagtggtg

SEQ ID NO: 3017 - DNA, 50 bp, Rattus norvegicus
gcaggtgatgtcatgcccattgttttggtgcgcccaaccaatcggactcg

SEQ ID NO: 3018 - DNA, 50 bp, Rattus norvegicus
cggcaccagtagtcaaaggcccctcgccacccatcaaaagtgacaagcac

SEQ ID NO: 3019 - DNA, 50 bp, Rattus norvegicus
agctgacattatgctgtaggatgtgctgcaggtgtgcaggcctgggaacg

SEQ ID NO: 3020 - DNA, 50 bp, Rattus norvegicus
ggatgctcattccttctacaatttcatctacttcatcctcctcatcatcg

SEQ ID NO: 3021 - DNA, 50 bp, Rattus norvegicus
cggaggttaaatgaacacggttgtttatgaagacacagcccgaatccatt

SEQ ID NO: 3022 - DNA, 50 bp, Rattus norvegicus
cggcaggaggacagtcgggtgatggtgtattctgccctgcgcatcccacc

SEQ ID NO: 3023 - DNA, 50 bp, Rattus norvegicus
acgcctataatttgtgtgagttgatcatactttggtaaatcagcaggtcg

SEQ ID NO: 3024 - DNA, 50 bp, Rattus norvegicus
cgagagacaagagaataattctacgaggccgtgtagaacaagcagagaga

SEQ ID NO: 3025 - DNA, 50 bp, Rattus norvegicus
agtttggcttgtgcttctgcaatttttcggttattctcttccagtattcg

SEQ ID NO: 3026 - DNA, 50 bp, Rattus norvegicus
cgcagaccaaactggagcatgcccgcattaaggagcttgaacagagcctg

SEQ ID NO: 3027 - DNA, 50 bp, Rattus norvegicus
gactccggggagtatttctgcctggcctccaacaagatgggcagcatccg

SEQ ID NO: 3028 - DNA, 50 bp, Rattus norvegicus
tgactaactacctcgctcaatagtaattcatttagagaatattaaaatcg

SEQ ID NO: 3029 - DNA, 50 bp, Rattus norvegicus
tggctttaattttccaaatctgcaaatgcatccgttatgtccccgcatcg

SEQ ID NO: 3030 - DNA, 50 bp, Rattus norvegicus
acagtcagcggagagcaagtttgcttgttttcttccctgttaacaaatcg

SEQ ID NO: 3031 - DNA, 50 bp, Rattus norvegicus
tgtgatgcgtgggctgtcgggacatctgtcttctatacctaataaagtcg

SEQ ID NO: 3032 - DNA, 50 bp, Rattus norvegicus
cgcgaagatggctgctggctgcctgctggccttgactctgacacttttcc

SEQ ID NO: 3033 - DNA, 50 bp, Rattus norvegicus
tcttttggaaattctctattctctcaccttattaatgttaaaacaaaacg

SEQ ID NO: 3034 - DNA, 50 bp, Rattus norvegicus
cgagccacatgcggtagtgtgtagcaattagtagataaaatgctgactaa

SEQ ID NO: 3035 - DNA, 50 bp, Rattus norvegicus
ggtgccatttagtggcgggctcaatggcgtactctctgaaggtcacttcg

SEQ ID NO: 3036 - DNA, 50 bp, Rattus norvegicus
ccatctcccacggattctcctagatcccatcagattgtccctggaggtcg

SEQ ID NO: 3037 - DNA, 50 bp, Rattus norvegicus
ttctaaatcaaattcaagggtcactgattgttaaggcaaccatgggtacg

SEQ ID NO: 3038 - DNA, 50 bp, Rattus norvegicus
cgtcgcgctgacattgaagtgtaatttttcatggttatttggactggaaa

SEQ ID NO: 3039 - DNA, 50 bp, Rattus norvegicus
atggtggggctggacggcactactgcaacaaagcaaacacggtcagcacg

SEQ ID NO: 3040 - DNA, 50 bp, Rattus norvegicus
ctaactctccctacggcagtaagtgtctgtttttgtcacacgtcatcacg

SEQ ID NO: 3041 - DNA, 50 bp, Rattus norvegicus
cgtgccggctttcctcagcaagctgtggacgcttgtggaggaaacccaca

SEQ ID NO: 3042 - DNA, 50 bp, Rattus norvegicus
acgttcttgtcattccttatgttacagaacatcaatcataaataaagacg

SEQ ID NO: 3043 - DNA, 50 bp, Rattus norvegicus
cggtagccgtccttcagcagctggatgttcaaatcttggttgatctgctg

SEQ ID NO: 3044 - DNA, 50 bp, Unknown
  Description of Unknown: Universal CpG sequence
taattgaaatttgttgccttgatctgtcagcacttccaggcaggagagcg

SEQ ID NO: 3045 - DNA, 50 bp, Unknown
  Description of Unknown: Universal CpG sequence
tgggcatggcacacactgctccgtctggccgtggtaatacgttccctgcg

SEQ ID NO: 3046 - DNA, 50 bp, Unknown
  Description of Unknown: Universal CpG sequence
cggatacatctagggttggcatttcaaggaatatgtgtgggtttttcgtc

SEQ ID NO: 3047 - DNA, 50 bp, Unknown
  Description of Unknown: Universal CpG sequence
gtagtgtcaaagttcactatatacagacattcgcgcagatccccctttcg

SEQ ID NO: 3048 - DNA, 50 bp, Unknown
  Description of Unknown: Universal CpG sequence
cgtgtgttattttatttgtctagagagagcctatttgttcagtgatgtgt

SEQ ID NO: 3049 - DNA, 50 bp, Unknown
  Description of Unknown: Universal CpG sequence
cgtagagtgacgttttctgttgtgagtcagcctcaggacccacatcaggg

SEQ ID NO: 3050 - DNA, 50 bp, Unknown
  Description of Unknown: Universal CpG sequence
ccggggcggggattaccttgtagcaggagcccgcagacactgtagaagcg

SEQ ID NO: 3051 - DNA, 50 bp, Unknown
  Description of Unknown: Universal CpG sequence
cgcctttgatgaaatcccagcaggcttaaacaataaagctggttacaaac

SEQ ID NO: 3052 - DNA, 50 bp, Unknown
  Description of Unknown: Universal CpG sequence
ctctgaacctttaaagtgatgttgctccaattacagagagacattgagcg

SEQ ID NO: 3053 - DNA, 50 bp, Unknown
  Description of Unknown: Universal CpG sequence
catccaagtaggcctgaaacgtcttgggctttgaaatccgcaccatggcg

SEQ ID NO: 3054 - DNA, 50 bp, Unknown
  Description of Unknown: Universal CpG sequence
cgagaggacccgagtggtgttatcttaactttgaaaaagcgacctcagag

SEQ ID NO: 3055 - DNA, 50 bp, Unknown
  Description of Unknown: Universal CpG sequence
aattcatttatctgcaggaatgattgctgctatcagtctcgcgctcaccg

SEQ ID NO: 3056 - DNA, 50 bp, Unknown
  Description of Unknown: Universal CpG sequence
ggccctctctccggctcacctaatgaccaggagttcgtggagcagatacg

SEQ ID NO: 3057 - DNA, 50 bp, Unknown
  Description of Unknown: Universal CpG sequence
ccccccttgattgctgattttacgctttttggaccaattgtgggtctccg

SEQ ID NO: 3058 - DNA, 50 bp, Unknown
  Description of Unknown: Universal CpG sequence
cccttccaattggatcacgaccctctgtgtgctcagcttaagaccagacg

SEQ ID NO: 3059 - DNA, 50 bp, Unknown
  Description of Unknown: Universal CpG sequence
tgccatggggacaaggtgggagccggggatggcgcgcgcctgggctcgcg

SEQ ID NO: 3060 - DNA, 50 bp, Unknown
  Description of Unknown: Universal CpG sequence
tgtcttttgcggtttatcttcctggggagaaactttcacctcctcagccg

SEQ ID NO: 3061 - DNA, 50 bp, Unknown
  Description of Unknown: Universal CpG sequence
cgcttctaacgtgataaattctttcatttgtgtaagcaaatttcgtttgg

SEQ ID NO: 3062 - DNA, 50 bp, Unknown
  Description of Unknown: Universal CpG sequence
cggttccaagcagcagagacgtcaggaaaggcacttcttagtaccaacct

SEQ ID NO: 3063 - DNA, 50 bp, Unknown
  Description of Unknown: Universal CpG sequence
cgggaccagctgctggccacatttcctgctttattttaaaaggtagtata

SEQ ID NO: 3064 - DNA, 50 bp, Unknown
  Description of Unknown: Universal CpG sequence
cgcgcaattaaggatttaaccaaggctgtgctgcgcctcagccagcagtc

SEQ ID NO: 3065 - DNA, 50 bp, Unknown
  Description of Unknown: Universal CpG sequence
cgccagttccaggactggtgcctcaggacttacggggactcaggcaagac

SEQ ID NO: 3066 - DNA, 50 bp, Unknown
  Description of Unknown: Universal CpG sequence
gacagggttcaaagttttaataatatttggataatatcattgcccacacg

SEQ ID NO: 3067 - DNA, 50 bp, Unknown
  Description of Unknown: Universal CpG sequence
cgctgtgaggcacctgccaagaacatcgccaccagcctgcatgagatctg

SEQ ID NO: 3068 - DNA, 50 bp, Unknown
  Description of Unknown: Universal CpG sequence
cggccattctgactctgcgccagcagcactaggcaattgtgtttttagga

SEQ ID NO: 3069 - DNA, 50 bp, Unknown
  Description of Unknown: Universal CpG sequence
gcgcctcaagaccttcagctccaagagcgagtaccagctggtggtgaacg

SEQ ID NO: 3070 - DNA, 50 bp, Unknown
  Description of Unknown: Universal CpG sequence
cggtccagctgagcatcccttccactagagggccatgtgacacctaagga

SEQ ID NO: 3071 - DNA, 50 bp, Unknown
  Description of Unknown: Universal CpG sequence
cgagactttttacttggattaattacatgacactcagcaaagagcttctc

SEQ ID NO: 3072 - DNA, 50 bp, Unknown
  Description of Unknown: Universal CpG sequence
cgcaaatacagaaatcaaattaggaaaacaagatatgtgggtgtgaggca

SEQ ID NO: 3073 - DNA, 50 bp, Unknown
  Description of Unknown: Universal CpG sequence
tacaggtcatacctggtggcataggctggcttcacctcgtgggggttccg

SEQ ID NO: 3074 - DNA, 50 bp, Unknown
  Description of Unknown: Universal CpG sequence
cgaggaggaaaaggacatctgattcatagcaagccctgccaaagtacagc

SEQ ID NO: 3075 - DNA, 50 bp, Unknown
  Description of Unknown: Universal CpG sequence
cgagtaacctcttgtcattttgccctccaggacctgagctaattggtgta

SEQ ID NO: 3076 - DNA, 50 bp, Unknown
  Description of Unknown: Universal CpG sequence
caaagtcgtctgtgacaatctggcaacctctgaaactctttgcttattcg

SEQ ID NO: 3077 - DNA, 50 bp, Unknown
  Description of Unknown: Universal CpG sequence
tgacacactgatttaaacatttattcactccaactacacaaatacacacg

SEQ ID NO: 3078 - DNA, 50 bp, Unknown
  Description of Unknown: Universal CpG sequence
cgtgtgccatgcttgtttgcctaccagtgctgcttagattggcaaatgcc

SEQ ID NO: 3079 - DNA, 50 bp, Unknown
  Description of Unknown: Universal CpG sequence
tggtagagatgccacactcgctccgcggttcgcatggcgctctgaagacg

SEQ ID NO: 3080 - DNA, 50 bp, Unknown
  Description of Unknown: Universal CpG sequence
cggattatttgaatttcattatatctattgatttgggagcatttcatctt

SEQ ID NO: 3081 - DNA, 50 bp, Unknown
  Description of Unknown: Universal CpG sequence
aattaaagttatcctggacaaaaacctcatctgtaatgactagctaaccg

SEQ ID NO: 3082 - DNA, 50 bp, Unknown
  Description of Unknown: Universal CpG sequence
cggttttgagttaaactgggtgaagtagaaatattttactcatcagcttt

SEQ ID NO: 3083 - DNA, 50 bp, Unknown
  Description of Unknown: Universal CpG sequence
cggcttccccagctctggcaccctattctgggcaccacgcccagggcttg

SEQ ID NO: 3084 - DNA, 50 bp, Unknown
  Description of Unknown: Universal CpG sequence
attcttactccctcgaggagagccacaggttgcaaatccaaccaacctcg

SEQ ID NO: 3085 - DNA, 50 bp, Unknown
  Description of Unknown: Universal CpG sequence
gatttatcttgtagtggaattagtattcccccaaagggcccggcgtggcg

SEQ ID NO: 3086 - DNA, 50 bp, Unknown
  Description of Unknown: Universal CpG sequence
cggccccagagccccagcccgatcccaaaaatagccccagcctgcccaag

SEQ ID NO: 3087 - DNA, 50 bp, Unknown
  Description of Unknown: Universal CpG sequence
cggcggcttcatttgcaaatgtgaacagattctcagagcagataaatgaa

SEQ ID NO: 3088 - DNA, 50 bp, Unknown
  Description of Unknown: Universal CpG sequence
gatgcctagggggtttatactggaaggaccagagccgcagcctctacccg

SEQ ID NO: 3089 - DNA, 50 bp, Unknown
  Description of Unknown: Universal CpG sequence
tgaatttatattaatttttcccttatttttcgggtctctaatgtcttccg

SEQ ID NO: 3090 - DNA, 50 bp, Unknown
  Description of Unknown: Universal CpG sequence
acctttgttcattagatacacataccaccatcatatccatcacctcctcg

SEQ ID NO: 3091 - DNA, 50 bp, Unknown
  Description of Unknown: Universal CpG sequence
cgtgttctgcagtttaactacttccaaattctttgttcaggtcaccccgg

SEQ ID NO: 3092 - DNA, 50 bp, Unknown
  Description of Unknown: Universal CpG sequence
tgccagccccctcgtctgattacatctagtaattctccactgaatgaacg

SEQ ID NO: 3093 - DNA, 50 bp, Unknown
  Description of Unknown: Universal CpG sequence
ctcatttggaccaaaacaaactcctccaaactgctactgactgctaaccg

SEQ ID NO: 3094 - DNA, 50 bp, Unknown
  Description of Unknown: Universal CpG sequence
cgcgccgcttgtctcttaatctccagagcgaccgatcgattcgctatttc

SEQ ID NO: 3095 - DNA, 50 bp, Unknown
  Description of Unknown: Universal CpG sequence
cggcttaatctcctgggatgagtacagaaacgtgacttatggcacttacc

SEQ ID NO: 3096 - DNA, 50 bp, Unknown
  Description of Unknown: Universal CpG sequence
ctttgaggagatccagttttttaatggccacaactatcacaaaggcatcg

SEQ ID NO: 3097 - DNA, 50 bp, Unknown
  Description of Unknown: Universal CpG sequence
ggagcgcctgcgagctggatctggtggaggatgctgcggcaggtgcttcg

SEQ ID NO: 3098 - DNA, 50 bp, Unknown
  Description of Unknown: Universal CpG sequence
cgcctgcggccaccgccatgtacctgcctacttagcccaagggttaatta

SEQ ID NO: 3099 - DNA, 50 bp, Unknown
  Description of Unknown: Universal CpG sequence
tgaatgcccaagctgaatagccatttgaatgaaggctttagtttgattcg

SEQ ID NO: 3100 - DNA, 50 bp, Unknown
  Description of Unknown: Universal CpG sequence
ggcaggcatggtacagagcgcttccttgcacagccttgcccatgagctcg

SEQ ID NO: 3101 - DNA, 50 bp, Unknown
  Description of Unknown: Universal CpG sequence
cggcaactccaaactaacatggcagtcagactgtgtgatgtggcttctct

SEQ ID NO: 3102 - DNA, 50 bp, Unknown
  Description of Unknown: Universal CpG sequence
cggaaattggggtcattctcatttgcaaagcggaggatcggagccccgta

SEQ ID NO: 3103 - DNA, 50 bp, Unknown
  Description of Unknown: Universal CpG sequence
atcattgttgaaatattccctttgaactgccgtgtccacgggggtctccg

SEQ ID NO: 3104 - DNA, 50 bp, Unknown
  Description of Unknown: Universal CpG sequence
taattgttctccctgggaaaaacagaatggcatgcattttccacaatacg

SEQ ID NO: 3105 - DNA, 50 bp, Unknown
  Description of Unknown: Universal CpG sequence
cgtgggaatttagctaaaactgttaaaactgacaccattggcttttgtta

SEQ ID NO: 3106 - DNA, 50 bp, Unknown
  Description of Unknown: Universal CpG sequence
cgtggaaactttttaacatgctttgtcgcatttatatgctacaggttaca

SEQ ID NO: 3107 - DNA, 50 bp, Unknown
  Description of Unknown: Universal CpG sequence
gaatggttccttctcatccaactgcccatgcgccaatgatgctaatgacg

SEQ ID NO: 3108 - DNA, 50 bp, Unknown
  Description of Unknown: Universal CpG sequence
cgggggctgggctaacaatgcaccatcaggccctttgtgtgcctgcactt

SEQ ID NO: 3109 - DNA, 50 bp, Unknown
  Description of Unknown: Universal CpG sequence
aacacgatttaaaggcacgatgacactgattactgaccctctgccatacg

SEQ ID NO: 3110 - DNA, 50 bp, Unknown
  Description of Unknown: Universal CpG sequence
ttccaaagccaaaaatttggacattgaccccaaactgcaagaatacctcg

SEQ ID NO: 3111 - DNA, 50 bp, Unknown
  Description of Unknown: Universal CpG sequence
cgccagcccgcgggtggctctctgcaggtgtcaatttattccagagatga

SEQ ID NO: 3112 - DNA, 50 bp, Unknown
  Description of Unknown: Universal CpG sequence
agatgacactaggacattgacataaatggagccataaaaagactcacacg

SEQ ID NO: 3113 - DNA, 50 bp, Unknown
  Description of Unknown: Universal CpG sequence
atagcaccatcaccttattaggtcacagcagagtgagtgtcccaatgtcg

SEQ ID NO: 3114 - DNA, 50 bp, Unknown
  Description of Unknown: Universal CpG sequence
atcttttaataaacagtttacttttatttaacttgttgtgcaaaatcacg

SEQ ID NO: 3115 - DNA, 50 bp, Unknown
  Description of Unknown: Universal CpG sequence
cggatgagctgtctcaaggccatattccaggggaacgataagagctgtaa

SEQ ID NO: 3116 - DNA, 50 bp, Unknown
  Description of Unknown: Universal CpG sequence
ccaatcactggaggtttcaaggaggcaaatgggttccttgcggcaaagcg

SEQ ID NO: 3117 - DNA, 50 bp, Unknown
  Description of Unknown: Universal CpG sequence
ttgcccccctactggggttatttgtccttgggttgaagggttggaaatcg

SEQ ID NO: 3118 - DNA, 50 bp, Unknown
  Description of Unknown: Universal CpG sequence
taccaattttaatttgcctctaattaaatcctgtgtatttttccgactcg

SEQ ID NO: 3119 - DNA, 50 bp, Unknown
  Description of Unknown: Universal CpG sequence
cgctagtaattctcccgtgtggttgaattctaccgtagagataatgtcag

SEQ ID NO: 3120 - DNA, 50 bp, Unknown
  Description of Unknown: Universal CpG sequence
aatagcacagaagtcagaggcaagtttgaaagtacaccagaaataaaacg

SEQ ID NO: 3121 - DNA, 50 bp, Unknown
  Description of Unknown: Universal CpG sequence
cgcactggtctcttaaagagtgcctaatttatagtaaatagcaaggtctt

SEQ ID NO: 3122 - DNA, 50 bp, Unknown
  Description of Unknown: Universal CpG sequence
cacgtagcccaagcggccgatggtgatggctggaatggcagagggactcg

SEQ ID NO: 3123 - DNA, 50 bp, Unknown
  Description of Unknown: Universal CpG sequence
ctcatccttaccattttgacaatctggttatttaaaaatcatcgattccg

SEQ ID NO: 3124 - DNA, 50 bp, Unknown
  Description of Unknown: Universal CpG sequence
tttttatttattcgtggagcctctcggctcctggggtccttctaactccg

SEQ ID NO: 3125 - DNA, 50 bp, Unknown
  Description of Unknown: Universal CpG sequence
cgaatggcccaaggaagccaccaaattgattttcaggttttacatgacct

SEQ ID NO: 3126 - DNA, 50 bp, Unknown
  Description of Unknown: Universal CpG sequence
gaaaggccatggtgccagttgcgcaatttggcaaaacgtgggctgttacg

SEQ ID NO: 3127 - DNA, 50 bp, Unknown
  Description of Unknown: Universal CpG sequence
cgagtggtaataaggacaataggggccctggctaatttgacatggacagc

SEQ ID NO: 3128 - DNA, 50 bp, Unknown
  Description of Unknown: Universal CpG sequence
aggtatggctgctatggggccagtttcctcctcttgtttttggcaggacg

SEQ ID NO: 3129 - DNA, 50 bp, Unknown
  Description of Unknown: Universal CpG sequence
cgggacccctggcatcggtatttatgggaaaaaaatgggaaatgtgctgt

SEQ ID NO: 3130 - DNA, 50 bp, Unknown
  Description of Unknown: Universal CpG sequence
cgttatgtaccttcaggtgttagagtgtgagcgtaaccaacacctggtcc

SEQ ID NO: 3131 - DNA, 50 bp, Unknown
  Description of Unknown: Universal CpG sequence
cgggggtgaaatgcagcggccattctgactctgcgccagcagcactaggc

SEQ ID NO: 3132 - DNA, 50 bp, Unknown
  Description of Unknown: Universal CpG sequence
cgcagagagccaggttgccaatgaaaaagtacatgcggttgtgaaattta

SEQ ID NO: 3133 - DNA, 50 bp, Unknown
  Description of Unknown: Universal CpG sequence
ataaagttctccctgcgcgtcccttctaaacatttcactcagtggaaacg

SEQ ID NO: 3134 - DNA, 50 bp, Unknown
  Description of Unknown: Universal CpG sequence
cgaccctttctgtaaacattttacagctctccgcgcgtttgagtgacgat

SEQ ID NO: 3135 - DNA, 50 bp, Unknown
  Description of Unknown: Universal CpG sequence
gcagcagctggttgctgttactcaggacctgggcagagagagcagcctcg

SEQ ID NO: 3136 - DNA, 50 bp, Unknown
  Description of Unknown: Universal CpG sequence
cgggccactgttgctaaccaccatcctggtgcaggtccttcacatctgct

SEQ ID NO: 3137 - DNA, 50 bp, Unknown
  Description of Unknown: Universal CpG sequence
cgcctggaagcagctggcttccaccataccccagatgcctcagatcccag

SEQ ID NO: 3138 - DNA, 50 bp, Unknown
  Description of Unknown: Universal CpG sequence
ctcaacatccatctccatcttcccattcactggagggcaagacaaaagcg

SEQ ID NO: 3139 - DNA, 50 bp, Unknown
  Description of Unknown: Universal CpG sequence
ttgatggcatctttgctccaggtgacacctgcatgctggccagctgagcg

SEQ ID NO: 3140 - DNA, 50 bp, Unknown
  Description of Unknown: Universal CpG sequence
gactcaattgacacctcagtgaaccacaaattagcgtctacagctgctcg

SEQ ID NO: 3141 - DNA, 50 bp, Unknown
  Description of Unknown: Universal CpG sequence
cggcatgtaagaacacttggattttgagtagcacgcccacatttacaccc

SEQ ID NO: 3142 - DNA, 50 bp, Unknown
  Description of Unknown: Universal CpG sequence
cggaagctttaattctattgaaatggcagctgctcagctccggggcacag

SEQ ID NO: 3143 - DNA, 50 bp, Unknown
  Description of Unknown: Universal CpG sequence
aagtccctcaaaatgacggacgcgcaggtcaagacctggttccaaaaccg

SEQ ID NO: 3144 - DNA, 50 bp, Unknown
  Description of Unknown: Universal CpG sequence
ttcttctatcaaccctgcttaggatgagaacaagttgagcagtgccaacg

SEQ ID NO: 3145 - DNA, 50 bp, Unknown
  Description of Unknown: Universal CpG sequence
cgacacaatggttagtagttatcttccatttgatccgtaatctttattgg

SEQ ID NO: 3146 - DNA, 50 bp, Unknown
  Description of Unknown: Universal CpG sequence
acaatagtctaatttacatgacattctccatgaagctattttcactgacg

SEQ ID NO: 3147 - DNA, 50 bp, Unknown
  Description of Unknown: Universal CpG sequence
tagacgtgaacttgtcgattgggcaaattgtttttggtctccaactgccg

SEQ ID NO: 3148 - DNA, 50 bp, Unknown
  Description of Unknown: Universal CpG sequence
cgtggcagcctgcagcactgtgtatggtttaaattaaacctttttttgga

SEQ ID NO: 3149 - DNA, 50 bp, Unknown
  Description of Unknown: Universal CpG sequence
aagtcccagagtcctccaaggtgagccgggttattctcagcacactcacg

SEQ ID NO: 3150 - DNA, 50 bp, Unknown
  Description of Unknown: Universal CpG sequence
acttggtaatagacctttttatgacctatttgcggtcgtcattggctgcg

SEQ ID NO: 3151 - DNA, 50 bp, Unknown
  Description of Unknown: Universal CpG sequence
cgggaattagacgggcgagttccaaattcttactgactttggcagctcct

SEQ ID NO: 3152 - DNA, 50 bp, Unknown
  Description of Unknown: Universal CpG sequence
gcccaccatgtacgcctttgtgcggttcctggaggacaacgtctgctacg

SEQ ID NO: 3153 - DNA, 50 bp, Unknown
  Description of Unknown: Universal CpG sequence
tttattccgaggcaggagccccggcgtgattaggccctttgtaattatcg

SEQ ID NO: 3154 - DNA, 50 bp, Unknown
  Description of Unknown: Universal CpG sequence
cgcgggctctccagagccccagctatgtttcccattatgtaaccctggtc

SEQ ID NO: 3155 - DNA, 50 bp, Unknown
  Description of Unknown: Universal CpG sequence
cggaagtactttgttttttatgctaatgagggagtggggcttgtccgtat

SEQ ID NO: 3156 - DNA, 50 bp, Unknown
  Description of Unknown: Universal CpG sequence
cgcagtggtgcaattgacatgagcaagagggattttgttgaagagaggct

SEQ ID NO: 3157 - DNA, 50 bp, Unknown
  Description of Unknown: Universal CpG sequence
caaatcccaagccattaaaatacgactaattttaagttaaacagaagtcg

SEQ ID NO: 3158 - DNA, 50 bp, Unknown
  Description of Unknown: Universal CpG sequence
cggccccggcggaaaaccaagacgctcatgaagaaggataagtacacgct

SEQ ID NO: 3159 - DNA, 50 bp, Unknown
  Description of Unknown: Universal CpG sequence
ccccaacctgacggcttctctctttacacacagtgaagttcaagtcctcg

SEQ ID NO: 3160 - DNA, 50 bp, Unknown
  Description of Unknown: Universal CpG sequence
aaaagtcagtttataccatcctttaaagtgaatcaaagaatgcataaacg

SEQ ID NO: 3161 - DNA, 50 bp, Unknown
  Description of Unknown: Universal CpG sequence
cggggcagctctggggctttctgcctgaagacctctggcccccgctgccc

SEQ ID NO: 3162 - DNA, 50 bp, Unknown
  Description of Unknown: Universal CpG sequence
tttacaaactgtcaataaggcaagaaaagccctgccaggaaacacaaacg

SEQ ID NO: 3163 - DNA, 50 bp, Unknown
  Description of Unknown: Universal CpG sequence
cggtctgttcctcaaaaagggcagtcttttcagtgcaaccactttaatgt

SEQ ID NO: 3164 - DNA, 50 bp, Unknown
  Description of Unknown: Universal CpG sequence
cgggtcttgaaggcatagtaggtacagctcatgatgaggagtccattgta

SEQ ID NO: 3165 - DNA, 50 bp, Unknown
  Description of Unknown: Universal CpG sequence
cggaaattgaagcaatcactaaaaggtgtcggggaattaaaatgtcctgt

SEQ ID NO: 3166 - DNA, 50 bp, Unknown
  Description of Unknown: Universal CpG sequence
cgggaagtgcctctccaactctggcaatcaacactgtgactaacaaagta

SEQ ID NO: 3167 - DNA, 50 bp, Unknown
  Description of Unknown: Universal CpG sequence
ctaacagaaagtgtcgggcccccagtgggatttctggggaagaactctcg

SEQ ID NO: 3168 - DNA, 50 bp, Unknown
  Description of Unknown: Universal CpG sequence
cggtgggcccagggcttccccttggagtgagcctggagccttctgtgacg

SEQ ID NO: 3169 - DNA, 50 bp, Unknown
  Description of Unknown: Universal CpG sequence
cggcttggaaaatcccaccgccaaaattgagcccagcagctggagcggca

SEQ ID NO: 3170 - DNA, 50 bp, Unknown
  Description of Unknown: Universal CpG sequence
cggaaagaggaccctgctttacccacacaggttcctctgcagtacaatga

SEQ ID NO: 3171 - DNA, 50 bp, Unknown
  Description of Unknown: Universal CpG sequence
cggtgcttttgactgacaagcatattgttatgattatgactggacttctt

SEQ ID NO: 3172 - DNA, 50 bp, Unknown
  Description of Unknown: Universal CpG sequence
cgtgtctttataaacagcttatctccttgagaacaaagaataaacaagga

SEQ ID NO: 3173 - DNA, 50 bp, Unknown
  Description of Unknown: Universal CpG sequence
cgcatgccaatcaccgtctctcatgtgatagctgctgcccgtgacgtgcc

SEQ ID NO: 3174 - DNA, 50 bp, Unknown
  Description of Unknown: Universal CpG sequence
cgggctgttaacaggcagttgcaatcagtttccgaaaggtcagccaaggt

SEQ ID NO: 3175 - DNA, 50 bp, Unknown
  Description of Unknown: Universal CpG sequence
cggtcagtggaaacaggacatttggatggagtatttatgcataagcgagc

SEQ ID NO: 3176 - DNA, 50 bp, Unknown
  Description of Unknown: Universal CpG sequence
ggaaattttccccaaagacacagccagtcttggtgcaattagtgacaacg

SEQ ID NO: 3177 - DNA, 50 bp, Unknown
  Description of Unknown: Universal CpG sequence
ttgagccgggccttcatgaatgtggtccatgtgtcctccagcaggaatcg

SEQ ID NO: 3178 - DNA, 50 bp, Unknown
  Description of Unknown: Universal CpG sequence
cgacacagttcaatgcaaaatcagatataaatctagcttaagagactctc

SEQ ID NO: 3179 - DNA, 50 bp, Unknown
  Description of Unknown: Universal CpG sequence
cgtgcttttataagtatttgaaaagaaaatattttaaagatttgaaatag

SEQ ID NO: 3180 - DNA, 50 bp, Unknown
  Description of Unknown: Universal CpG sequence
gaacactaatgaagctggcaaaacaacttttctttttttatggctgagcg

SEQ ID NO: 3181 - DNA, 50 bp, Unknown
  Description of Unknown: Universal CpG sequence
cctctgtttgccataaagatctccagggctgtattttgcaaaagataacg

SEQ ID NO: 3182 - DNA, 50 bp, Unknown
  Description of Unknown: Universal CpG sequence
gttgctttagcgcttacgccccgcctctggtggctgcctaaaacctggcg

SEQ ID NO: 3183 - DNA, 50 bp, Unknown
  Description of Unknown: Universal CpG sequence
gatgagggtcccagcggatcggaaatgtgaagggtcagcgctgccgcccg

SEQ ID NO: 3184 - DNA, 50 bp, Unknown
  Description of Unknown: Universal CpG sequence
tggcttgtgtgtcaccatatgccgctcgagctgggtgcggtaggcaaacg

SEQ ID NO: 3185 - DNA, 50 bp, Unknown
  Description of Unknown: Universal CpG sequence
cgtgcttcaatcagctggctgtgtaagaattcaatcagcgttaatctaac

SEQ ID NO: 3186 - DNA, 50 bp, Unknown
  Description of Unknown: Universal CpG sequence
cgagtgccttcccaatggtcagccacccagtctttggtctacattcagcc

SEQ ID NO: 3187 - DNA, 50 bp, Unknown
  Description of Unknown: Universal CpG sequence
ctgttgaagatgacctctagccagcacgggcagctgctgatgaactggcg

SEQ ID NO: 3188 - DNA, 50 bp, Unknown
  Description of Unknown: Universal CpG sequence
cgaattgtgatctgattacctgaactcagtggaagtgattctcctactca

SEQ ID NO: 3189 - DNA, 50 bp, Unknown
  Description of Unknown: Universal CpG sequence
gcaacatctggcaaaaccttttcagcaaattcttcctggccgtcagtccg

SEQ ID NO: 3190 - DNA, 50 bp, Unknown
  Description of Unknown: Universal CpG sequence
cggtgagcaaatggtctccgagtcaagtagtggactggatgaaaggtaat

SEQ ID NO: 3191 - DNA, 50 bp, Unknown
  Description of Unknown: Universal CpG sequence
aagttataattgatatcggggcccatcaccataatgggttcatcatagcg

SEQ ID NO: 3192 - DNA, 50 bp, Unknown
  Description of Unknown: Universal CpG sequence
cgagactggcagcatccggcctggagtgatagggggctccaagcccaagg

SEQ ID NO: 3193 - DNA, 50 bp, Unknown
  Description of Unknown: Universal CpG sequence
agaaaacatataatgtcctgttgaacacaggccaaatacattcccagacg

SEQ ID NO: 3194 - DNA, 50 bp, Unknown
  Description of Unknown: Universal CpG sequence
cgcttctgcactcacagtggtaccaccctggcaggttaacgcagcgggaa

SEQ ID NO: 3195 - DNA, 50 bp, Unknown
  Description of Unknown: Universal CpG sequence
tgcgagaacaggtaccagcaggctcaggtggagcagctggagctggagcg

SEQ ID NO: 3196 - DNA, 50 bp, Unknown
  Description of Unknown: Universal CpG sequence
ctgtgtgcatttcatttctgtcaagagtatgtacagttagggttcattcg

SEQ ID NO: 3197 - DNA, 50 bp, Unknown
  Description of Unknown: Universal CpG sequence
aaagagcttttggtgagtgctcattccaggataataaaccaagcaaaacg

SEQ ID NO: 3198 - DNA, 50 bp, Unknown
  Description of Unknown: Universal CpG sequence
cgccaggtccctagttagcagcttccttcagctcatccaagaagctgaca

SEQ ID NO: 3199 - DNA, 50 bp, Unknown
  Description of Unknown: Universal CpG sequence
cgaagctgtaaatcaggatgttacatataaatagtttccctataaaaacg

SEQ ID NO: 3200 - DNA, 50 bp, Unknown
  Description of Unknown: Universal CpG sequence
accacagcttgaaggctcaaagctgtgaaagataaattaaccttccctcg

SEQ ID NO: 3201 - DNA, 50 bp, Unknown
  Description of Unknown: Universal CpG sequence
cggcttaaaattagagttgtgaaggcattgaaaaacaccagacttcccag

SEQ ID NO: 3202 - DNA, 50 bp, Unknown
  Description of Unknown: Universal CpG sequence
cgggcagggtgacgtcaccgtctccctgacactccacattaaagggctgg

SEQ ID NO: 3203 - DNA, 50 bp, Unknown
  Description of Unknown: Universal CpG sequence
cgcttgtcttctcagcatggatgtttaatcttcctaggctttgtgaattg

SEQ ID NO: 3204 - DNA, 50 bp, Unknown
  Description of Unknown: Universal CpG sequence
cgccagggaaagcccttcaaagccaaatacaaacttgtaaatcacatccg

SEQ ID NO: 3205 - DNA, 50 bp, Unknown
  Description of Unknown: Universal CpG sequence
cggctgttaatgactttgatgttgatgtggaaaagtgaatgactgcataa

SEQ ID NO: 3206 - DNA, 50 bp, Unknown
  Description of Unknown: Universal CpG sequence
attgcttacccagtacatattaaatctcggcaagtatgatcaaaactacg

SEQ ID NO: 3207 - DNA, 50 bp, Unknown
  Description of Unknown: Universal CpG sequence
ctttctacttctcttcattcttcattgagtttttcatttttcatacttcg

SEQ ID NO: 3208 - DNA, 50 bp, Unknown
  Description of Unknown: Universal CpG sequence
gtgagactgtaaggtcgaataagctgcctcaaaacctgcaaagggtaacg

SEQ ID NO: 3209 - DNA, 50 bp, Unknown
  Description of Unknown: Universal CpG sequence
agtctgttattggctttataattacataattaactttttgtctctaatcg

SEQ ID NO: 3210 - DNA, 50 bp, Unknown
  Description of Unknown: Universal CpG sequence
atgttcagttccaaggagtcccagcggggcatgggctacatgcccaaacg

SEQ ID NO: 3211 - DNA, 50 bp, Unknown
  Description of Unknown: Universal CpG sequence
cgcctgcgccaccagaacccaagtgcaaaccaccatgttcagttctgcca

SEQ ID NO: 3212 - DNA, 50 bp, Unknown
  Description of Unknown: Universal CpG sequence
catgtcccactctgccatctaaacacaggctttttgtttcttaagtgacg

SEQ ID NO: 3213 - DNA, 50 bp, Unknown
  Description of Unknown: Universal CpG sequence
ttgggcagttctggacaagtcatggactcagtttctctacctgggaagcg

SEQ ID NO: 3214 - DNA, 50 bp, Unknown
  Description of Unknown: Universal CpG sequence
aattatgcaaatcctgctttctggtgtccattcagcggcaatttcatgcg

SEQ ID NO: 3215 - DNA, 50 bp, Unknown
  Description of Unknown: Universal CpG sequence
cgtgaggatcaagggctcaattggttgtcgtgagaacaaaaatggtgaca

SEQ ID NO: 3216 - DNA, 50 bp, Unknown
  Description of Unknown: Universal CpG sequence
ggctcggggcatttgctggatgtcccagatgagagcctggtggtcatccg

SEQ ID NO: 3217 - DNA, 50 bp, Unknown
  Description of Unknown: Universal CpG sequence
cgccataggccatattaagcaaattgtccagcctgcaaagagaaggaggg

SEQ ID NO: 3218 - DNA, 50 bp, Unknown
  Description of Unknown: Universal CpG sequence
agagaccgcccttctctctgcctgggtgaaaattaaactctaaagtaccg

SEQ ID NO: 3219 - DNA, 50 bp, Unknown
  Description of Unknown: Universal CpG sequence
ggtttagtgtagtcccaactgtcattgtcattcctaataacatttagacg

SEQ ID NO: 3220 - DNA, 50 bp, Unknown
  Description of Unknown: Universal CpG sequence
cgaggtatgcttttgtttgaaactatctgaaagacagaaagaaaagtcat

SEQ ID NO: 3221 - DNA, 50 bp, Unknown
  Description of Unknown: Universal CpG sequence
tggctttagcatgcttcttattagggctggcaaagctgggctggtaagcg

SEQ ID NO: 3222 - DNA, 50 bp, Unknown
  Description of Unknown: Universal CpG sequence
cggaaatgacgtcagcaaagtgaaggacctgtttactgcagatcaaaaca

SEQ ID NO: 3223 - DNA, 50 bp, Unknown
  Description of Unknown: Universal CpG sequence
cgtcggaccattcagttgtatgaaatgtacttcaaagatccccaggtaaa

SEQ ID NO: 3224 - DNA, 50 bp, Unknown
  Description of Unknown: Universal CpG sequence
tcactggcagtggacaccacggagagcagggacatacgccgggtgagccg

SEQ ID NO: 3225 - DNA, 50 bp, Unknown
  Description of Unknown: Universal CpG sequence
cgtcagcaatacgccaagagcaaaaaacagggtaactcgtccaacagccg

SEQ ID NO: 3226 - DNA, 50 bp, Unknown
  Description of Unknown: Universal CpG sequence
cgcttcccaactggcagaagcatccctcaggggacaagtctttaaacctc

SEQ ID NO: 3227 - DNA, 50 bp, Unknown
  Description of Unknown: Universal CpG sequence
cgcgtgtgccacccccgctgcattgagcacgggacctgtaaagatggcaa

SEQ ID NO: 3228 - DNA, 50 bp, Unknown
  Description of Unknown: Universal CpG sequence
cgccatgtccatgtaagggcggcacggagtgatctagctgcattagagct

SEQ ID NO: 3229 - DNA, 50 bp, Unknown
  Description of Unknown: Universal CpG sequence
cgccttcatcatcagtgtcatgctcattgcggccaaccaggtgctgcgca

SEQ ID NO: 3230 - DNA, 50 bp, Unknown
  Description of Unknown: Universal CpG sequence
agggttttcattcagatgaagatgtggcccccagttccctgcgctctgcg

SEQ ID NO: 3231 - DNA, 50 bp, Unknown
  Description of Unknown: Universal CpG sequence
gctaatgtgctctggttcatctctttgagcagttcctttaaggcattgcg

SEQ ID NO: 3232 - DNA, 50 bp, Unknown
  Description of Unknown: Universal CpG sequence
cgtcatgctgcatataaacatttcaagaaagtcacaatgtataagaatgg

SEQ ID NO: 3233 - DNA, 50 bp, Unknown
  Description of Unknown: Universal CpG sequence
cggtgcctgcagctgatttgatgggttggaaatgcgcacgaaacaaaata

SEQ ID NO: 3234 - DNA, 50 bp, Unknown
  Description of Unknown: Universal CpG sequence
cggggagcccaccgactttattaacctgcacaatgcgcgggcgctcaagt

SEQ ID NO: 3235 - DNA, 50 bp, Unknown
  Description of Unknown: Universal CpG sequence
cgtgcttccttgcttttgacaagatttgctgcagtctcatgcgacaaaaa

SEQ ID NO: 3236 - DNA, 50 bp, Unknown
  Description of Unknown: Universal CpG sequence
agtggtgcctttgaatactttaacattccattatccaggacaaaaaaacg

SEQ ID NO: 3237 - DNA, 50 bp, Unknown
  Description of Unknown: Universal CpG sequence
cgggaggtctggatgtctgtcttccgctacctcagccgcagagaactttg

SEQ ID NO: 3238 - DNA, 50 bp, Unknown
  Description of Unknown: Universal CpG sequence
cggcaccagcatgattttgatgaaaatggaatcatttactggattggaac

SEQ ID NO: 3239 - DNA, 50 bp, Unknown
  Description of Unknown: Universal CpG sequence
cgcttcagggcactggcaaaatgaaagcgctggtgaattttcagcccctg

SEQ ID NO: 3240 - DNA, 50 bp, Unknown
  Description of Unknown: Universal CpG sequence
cgcagatgccgctcagggtcagcttcttctgcgggctctgcaggatggcc

SEQ ID NO: 3241 - DNA, 50 bp, Unknown
  Description of Unknown: Universal CpG sequence
tgaaatgtttccacagtttatttttctaggatcttttccatgactgctcg

SEQ ID NO: 3242 - DNA, 50 bp, Unknown
  Description of Unknown: Universal CpG sequence
cgacctgggtcttgagaaacttgagttagtagatgttagtttttcttagc

SEQ ID NO: 3243 - DNA, 50 bp, Unknown
  Description of Unknown: Universal CpG sequence
aggagcatacagcaaacatcagtttacagcatagctagatttgaaagacg

SEQ ID NO: 3244 - DNA, 50 bp, Unknown
  Description of Unknown: Universal CpG sequence
tgaagattttatagaaacgacatgaaaactacatttactgacattcatcg

SEQ ID NO: 3245 - DNA, 50 bp, Unknown
  Description of Unknown: Universal CpG sequence
cgggtcgtgtggaactcatcaagtaagtttcaaacgtcctcccaaaagtg

SEQ ID NO: 3246 - DNA, 50 bp, Unknown
  Description of Unknown: Universal CpG sequence
cgctggggaaccttcacactgttggggaagatttttatagtcagtgggtt

SEQ ID NO: 3247 - DNA, 50 bp, Unknown
  Description of Unknown: Universal CpG sequence
cgtgggccatttgtaaggcccaatagacctatccaagttactcgctgtag

SEQ ID NO: 3248 - DNA, 50 bp, Unknown
  Description of Unknown: Universal CpG sequence
cgtgatcgccaagtttctctctgggaaaggatctgggatagattatacct

SEQ ID NO: 3249 - DNA, 50 bp, Unknown
  Description of Unknown: Universal CpG sequence
acagagtgacagcaatgtgacaccatggaaataattactaacaaatcacg

SEQ ID NO: 3250 - DNA, 50 bp, Unknown
  Description of Unknown: Universal CpG sequence
ggattgctgcaaataaatacactttaatttcagtcaaaaactgctctacg

SEQ ID NO: 3251 - DNA, 50 bp, Unknown
  Description of Unknown: Universal CpG sequence
gggttgtagaagttatcaagtgggatttgcggcgctctctgcaggaaacg

SEQ ID NO: 3252 - DNA, 50 bp, Unknown
  Description of Unknown: Universal CpG sequence
cgcaccagcatagagaccaacatccgtgtggccttagagaagagtttctt

SEQ ID NO: 3253 - DNA, 50 bp, Unknown
  Description of Unknown: Universal CpG sequence
cgccgcagcccaaagccctgccattgtggcagctgttcagggcaacctcc

SEQ ID NO: 3254 - DNA, 50 bp, Unknown
  Description of Unknown: Universal CpG sequence
cgtggtgtaattgttgaatcagcgtattctgatatagtaaaaatggtaag

SEQ ID NO: 3255 - DNA, 50 bp, Unknown
  Description of Unknown: Universal CpG sequence
gcaggaccaggagcaccaggtggagctggagctgctgcgggacgacaacg

SEQ ID NO: 3256 - DNA, 50 bp, Unknown
  Description of Unknown: Universal CpG sequence
ttctcctgctcgtcggtcatcttcatgaaggggtccaggagattcatacg

SEQ ID NO: 3257 - DNA, 50 bp, Unknown
  Description of Unknown: Universal CpG sequence
cgcttaaaaggtttccatgggaacagtgaggggagatgaaggcagagaac

SEQ ID NO: 3258 - DNA, 50 bp, Unknown
  Description of Unknown: Universal CpG sequence
gacacgacgatgttgatgggcgagctggtgctgtaggacttggccaggcg

SEQ ID NO: 3259 - DNA, 50 bp, Unknown
  Description of Unknown: Universal CpG sequence
cgatgccatatacgttgtaaccttccttataagttgcaaaattctgtgaa

SEQ ID NO: 3260 - DNA, 50 bp, Unknown
  Description of Unknown: Universal CpG sequence
ctttctcatttagttaattaccgagtgaggatcatcatttccccggatcg

SEQ ID NO: 3261 - DNA, 50 bp, Unknown
  Description of Unknown: Universal CpG sequence
ttctggttctgaacgtgaaaccctgttggaaacaggtctcttgaccctcg

SEQ ID NO: 3262 - DNA, 50 bp, Unknown
  Description of Unknown: Universal CpG sequence
cttctgattaaatatgaattactatgaaatttttctcatcatctaacacg

SEQ ID NO: 3263 - DNA, 50 bp, Unknown
  Description of Unknown: Universal CpG sequence
cgggcggattaccgtacatgaggtacttggacaaagttttacggggaaga

SEQ ID NO: 3264 - DNA, 50 bp, Unknown
  Description of Unknown: Universal CpG sequence
cgggttaaatttattgccaagccctggctggctgcaaattcgaattgcca

SEQ ID NO: 3265 - DNA, 50 bp, Unknown
  Description of Unknown: Universal CpG sequence
gaaatagacttttccctcatccatcataagtcagcgtgacagggctgtcg

SEQ ID NO: 3266 - DNA, 50 bp, Unknown
  Description of Unknown: Universal CpG sequence
attaatgtgtcaagccaaactaatgcattttttatggtgtccatgcttcg

SEQ ID NO: 3267 - DNA, 50 bp, Unknown
  Description of Unknown: Universal CpG sequence
tttgtgttttccttactagaaaataattagacctaatgaatatgcagacg

SEQ ID NO: 3268 - DNA, 50 bp, Unknown
  Description of Unknown: Universal CpG sequence
cgggccgctgggctcctgcagagttttgatatgaaagtaattattttccg

SEQ ID NO: 3269 - DNA, 50 bp, Unknown
  Description of Unknown: Universal CpG sequence
cggacaggaagcctttggccgcctattaaatcccacccatttctccgggg

SEQ ID NO: 3270 - DNA, 50 bp, Unknown
  Description of Unknown: Universal CpG sequence
cgagtctccataggatgtcaacaataaaggggttaatgaagcatccgatc

SEQ ID NO: 3271 - DNA, 50 bp, Unknown
  Description of Unknown: Universal CpG sequence
cgtgtgcagtccttctggttttgggcaaggtcaaagccgggcctgcagtc

SEQ ID NO: 3272 - DNA, 50 bp, Unknown
  Description of Unknown: Universal CpG sequence
cgtctgttaaacgctttgaagattggaagcaacagataagtactggatga

SEQ ID NO: 3273 - DNA, 50 bp, Unknown
  Description of Unknown: Universal CpG sequence
cggtgacgggtattcttgggtggataatacggattacgttgttattgctt

SEQ ID NO: 3274 - DNA, 50 bp, Unknown
  Description of Unknown: Universal CpG sequence
tagacattacctaactcttgatttgtcacaccgggatcaataacatttcg

SEQ ID NO: 3275 - DNA, 50 bp, Unknown
  Description of Unknown: Universal CpG sequence
tttgttgatttattgtacgttagccaccgagccgtgcaaagaacattacg

SEQ ID NO: 3276 - DNA, 50 bp, Unknown
  Description of Unknown: Universal CpG sequence
cagataattcagaaactatctgtatgagctgtttatcaaattattaaccg

SEQ ID NO: 3277 - DNA, 50 bp, Unknown
  Description of Unknown: Universal CpG sequence
gcatctcttatttctttaaatacattaatcagcctagtgtaggcaaaacg

SEQ ID NO: 3278 - DNA, 50 bp, Unknown
  Description of Unknown: Universal CpG sequence
ggcctgattatggactgccaagactttttggagaaagcagtttcttgtcg

SEQ ID NO: 3279 - DNA, 50 bp, Unknown
  Description of Unknown: Universal CpG sequence
aacagtttgattaaatgagccatcataacaatgatgtctgcgggaaatcg

SEQ ID NO: 3280 - DNA, 50 bp, Unknown
  Description of Unknown: Universal CpG sequence
tggtagatgaggtggccctcagcgtcgtcctctacactcttggctctccg

SEQ ID NO: 3281 - DNA, 50 bp, Unknown
  Description of Unknown: Universal CpG sequence
gtgcgaattttcctacggcaaccacaacaattgcagtttccagattgtcg

SEQ ID NO: 3282 - DNA, 50 bp, Unknown
  Description of Unknown: Universal CpG sequence
cgctttgggcatttttgtatttcaaatttgcaagttgtcagtttgaaaaa

SEQ ID NO: 3283 - DNA, 50 bp, Unknown
  Description of Unknown: Universal CpG sequence
cgtcagtttcaagacaccaacactattaatatcaaaggagccttcgcgga

SEQ ID NO: 3284 - DNA, 50 bp, Unknown
  Description of Unknown: Universal CpG sequence
ctagtcttgggttactcataaacattcagcaaagcaatttcactcaatcg

SEQ ID NO: 3285 - DNA, 50 bp, Unknown
  Description of Unknown: Universal CpG sequence
cggccaaacatggaaccattttctgtggcgaatcgctgagttctacctgg

SEQ ID NO: 3286 - DNA, 50 bp, Unknown
  Description of Unknown: Universal CpG sequence
cgccccctggacaccagcctgcgcctcaagaccttcagctccaagagcga

SEQ ID NO: 3287 - DNA, 50 bp, Unknown
  Description of Unknown: Universal CpG sequence
cggcctggagtgatagggggctccaagcccaaggtggccacccccaaggt

SEQ ID NO: 3288 - DNA, 50 bp, Unknown
  Description of Unknown: Universal CpG sequence
cggcagtttaacctccgtgtctgtcagctgtgaccttttaccaaccccaa

SEQ ID NO: 3289 - DNA, 50 bp, Unknown
  Description of Unknown: Universal CpG sequence
cgcctgcttgcaccaggaacagctgatagccacaatctctttactgtgga

SEQ ID NO: 3290 - DNA, 50 bp, Unknown
  Description of Unknown: Universal CpG sequence
cgcttgaagcatatctatctgattagtggagagagtgctcttctctgtca

SEQ ID NO: 3291 - DNA, 50 bp, Unknown
  Description of Unknown: Universal CpG sequence
ggacagacgatcatcatgcaaatcaaggtcatcacttgtagcaccatccg

SEQ ID NO: 3292 - DNA, 50 bp, Unknown
  Description of Unknown: Universal CpG sequence
cgattttacaatttaatgcagcagcttcccgcccgcctgggacagatgcc

SEQ ID NO: 3293 - DNA, 50 bp, Unknown
  Description of Unknown: Universal CpG sequence
cgcccgcgagcccattcatctgtgcacttgggcgttggaccccgcatctt

SEQ ID NO: 3294 - DNA, 50 bp, Unknown
  Description of Unknown: Universal CpG sequence
ggctcccacggaaaatatgctcagtgcagccgcgtgcatgaatgaaaacg

SEQ ID NO: 3295 - DNA, 50 bp, Unknown
  Description of Unknown: Universal CpG sequence
cgtaatggcctgatttaatcacaaaggcagaattaaattcagatggcaac

SEQ ID NO: 3296 - DNA, 50 bp, Unknown
  Description of Unknown: Universal CpG sequence
aacgagggggctctaaagcctcgatgctctacaggaagcaaaatctgtcg

SEQ ID NO: 3297 - DNA, 50 bp, Unknown
  Description of Unknown: Universal CpG sequence
agtggtttggggtttgttccttttccctcctgttccttccctcagcagcg

SEQ ID NO: 3298 - DNA, 50 bp, Unknown
  Description of Unknown: Universal CpG sequence
ccattagcacttttgacagatccaaagataactctgaagccaccaaaacg

SEQ ID NO: 3299 - DNA, 50 bp, Unknown
  Description of Unknown: Universal CpG sequence
cggggattggatgatacagtttccatagcatctcgtagtagagaggtttc

SEQ ID NO: 3300 - DNA, 50 bp, Unknown
  Description of Unknown: Universal CpG sequence
cgcaaagcctgcttagattgtatatgtcgtggctgccaaaactcctatat

SEQ ID NO: 3301 - DNA, 50 bp, Unknown
  Description of Unknown: Universal CpG sequence
gccgtacaggaagctgtgcaggatgtcggaggtgataacctcggccagcg

SEQ ID NO: 3302 - DNA, 50 bp, Unknown
  Description of Unknown: Universal CpG sequence
cggtgggccgcttcaccttttcacagctgttaccattgagtgacaactaa

SEQ ID NO: 3303 - DNA, 50 bp, Unknown
  Description of Unknown: Universal CpG sequence
cgctggagtcctgggtttaatagagagagtccccatacgcttgtatttat

SEQ ID NO: 3304 - DNA, 50 bp, Unknown
  Description of Unknown: Universal CpG sequence
cgggaataatttgctttattttatgacaaatgcagaaataaaaagaaaaa

SEQ ID NO: 3305 - DNA, 50 bp, Unknown
  Description of Unknown: Universal CpG sequence
tattgcgcagacagcccataaataatttgcattatgttcagctgacaacg

SEQ ID NO: 3306 - DNA, 50 bp, Unknown
  Description of Unknown: Universal CpG sequence
atactcaacatcctgctcagaaccttggggattcatggcactaaaaaacg

SEQ ID NO: 3307 - DNA, 50 bp, Unknown
  Description of Unknown: Universal CpG sequence
gcaatcattggttctaatccaaggattgacagagctacaacacacgcgcg

SEQ ID NO: 3308 - DNA, 50 bp, Unknown
  Description of Unknown: Universal CpG sequence
cgtgccaaaatagaataaaatcagttaatagcatagattaagggttactt

SEQ ID NO: 3309 - DNA, 50 bp, Unknown
  Description of Unknown: Universal CpG sequence
tgcacagcgcacagtaccgggaagtcgttaattgcttgtatggaccaacg

SEQ ID NO: 3310 - DNA, 50 bp, Unknown
  Description of Unknown: Universal CpG sequence
taacttcttcccaaagtgcaagattcttaaatctccttcaaaacatttcg

SEQ ID NO: 3311 - DNA, 50 bp, Unknown
  Description of Unknown: Universal CpG sequence
gtcgtgttccctcttggcttcccatttcctttcccatggtgtctgggacg

SEQ ID NO: 3312 - DNA, 50 bp, Unknown
  Description of Unknown: Universal CpG sequence
ttcactgctttgccccagcattgaaatattgattcatctttcaacaaacg

SEQ ID NO: 3313 - DNA, 50 bp, Unknown
  Description of Unknown: Universal CpG sequence
gcatctccatgggcgtcttggggtcgaggccaaagccggggctgttaacg

SEQ ID NO: 3314 - DNA, 50 bp, Unknown
  Description of Unknown: Universal CpG sequence
ttcatctagaaggtttgactctggccagacaaccagcgagcatcttctcg

SEQ ID NO: 3315 - DNA, 50 bp, Unknown
  Description of Unknown: Universal CpG sequence
cgagcatttgcaagatgcaatgtccttcttaaaggatgtctgtgaggtac

SEQ ID NO: 3316 - DNA, 50 bp, Unknown
  Description of Unknown: Universal CpG sequence
gcttcttctgggatacacattctctaggtcttttatccactgaggtttcg

SEQ ID NO: 3317 - DNA, 50 bp, Unknown
  Description of Unknown: Universal CpG sequence
tggcttctggttgctgtatgtgaacgaatgttgcctgattattttaatcg

SEQ ID NO: 3318 - DNA, 50 bp, Unknown
  Description of Unknown: Universal CpG sequence
catgtctgtgcagtcaggaatgataagtgaaccacccgtgaatgttaacg

SEQ ID NO: 3319 - DNA, 50 bp, Unknown
  Description of Unknown: Universal CpG sequence
cgggcagctccaggaggggacggacaggaagcctttggccgcctattaaa

SEQ ID NO: 3320 - DNA, 50 bp, Unknown
  Description of Unknown: Universal CpG sequence
cattggattttatatcacacaaggacaatgtgccatgggtattaaaatcg

SEQ ID NO: 3321 - DNA, 50 bp, Unknown
  Description of Unknown: Universal CpG sequence
agcattgtaagtagctaggcctctccaaattaatgccttgttttgcatcg

SEQ ID NO: 3322 - DNA, 50 bp, Unknown
  Description of Unknown: Universal CpG sequence
aatatctttctttaaaatcctgacccaaaacacaacggggtgaaaaatcg

SEQ ID NO: 3323 - DNA, 50 bp, Unknown
  Description of Unknown: Universal CpG sequence
atccctctcttcctttattgcttcccgtattaagactattaataaatacg

SEQ ID NO: 3324 - DNA, 50 bp, Unknown
  Description of Unknown: Universal CpG sequence
cgtgtgccggatgctgcccatcttgttggaggccaggcagaaatactccc

SEQ ID NO: 3325 - DNA, 50 bp, Unknown
  Description of Unknown: Universal CpG sequence
tttcaggttgacgtcactccctgcctgctggctgtcaggactgggggacg

SEQ ID NO: 3326 - DNA, 50 bp, Unknown
  Description of Unknown: Universal CpG sequence
cgcatttatatgctacaggttacaaagtgagagccttgtatacacttcaa

SEQ ID NO: 3327 - DNA, 50 bp, Unknown
  Description of Unknown: Universal CpG sequence
gcccctgagtgcttattcatcaacgttttcaaaagcaaaatcactcttcg

SEQ ID NO: 3328 - DNA, 50 bp, Unknown
  Description of Unknown: Universal CpG sequence
cggatgtggttaaccagtttgtatttggctttgaagggcttgccctcgcg

SEQ ID NO: 3329 - DNA, 50 bp, Unknown
  Description of Unknown: Universal CpG sequence
cgcttgacaccctgacactaattttattcaagccattgggaaataaatgt

SEQ ID NO: 3330 - DNA, 50 bp, Unknown
  Description of Unknown: Universal CpG sequence
cgggaaaggttaattggggccgccagaacgcaatcattccttacctaacc

SEQ ID NO: 3331 - DNA, 50 bp, Unknown
  Description of Unknown: Universal CpG sequence
tgggaatccctagtgatgagcacataaagctgcctctaactcaagtgacg

SEQ ID NO: 3332 - DNA, 50 bp, Unknown
  Description of Unknown: Universal CpG sequence
gagggcggagcctgggaaaacccctctgcaacgctgcactgaacaaagcg

SEQ ID NO: 3333 - DNA, 50 bp, Unknown
  Description of Unknown: Universal CpG sequence
aaggcttccaactgtgacacaagtgcaaccatattgcttcctattactcg

SEQ ID NO: 3334 - DNA, 50 bp, Unknown
  Description of Unknown: Universal CpG sequence
ttggggagagcctgctacagttctttgtttgactccgggactcagggacg

SEQ ID NO: 3335 - DNA, 50 bp, Unknown
  Description of Unknown: Universal CpG sequence
cgccctgtttcttagcgccggatcctggggaccagacacggggagacaca

SEQ ID NO: 3336 - DNA, 50 bp, Unknown
  Description of Unknown: Universal CpG sequence
gtcgcttcaggatgtgtcgatcctagagggttacgcacaaatcgtcgccg

SEQ ID NO: 3337 - DNA, 50 bp, Unknown
  Description of Unknown: Universal CpG sequence
gttcttaaaccagttgcctacttgtgtgggagtgaggccggtggcctgcg

SEQ ID NO: 3338 - DNA, 50 bp, Unknown
  Description of Unknown: Universal CpG sequence
cgctacggttcgcagctaatgagcatgcagctggattgcaaatggctgga

SEQ ID NO: 3339 - DNA, 50 bp, Unknown
  Description of Unknown: Universal CpG sequence
aatacaatgtgacatctggagaataaattgttcagtcagccagaaatacg

SEQ ID NO: 3340 - DNA, 50 bp, Unknown
  Description of Unknown: Universal CpG sequence
cggcaaaggcgtttttatagggaaactatttatatgtaacatcctgattt

SEQ ID NO: 3341 - DNA, 50 bp, Unknown
  Description of Unknown: Universal CpG sequence
gtgcttctaaattacaatcaaacagttaccaattacacaaattattgacg

SEQ ID NO: 3342 - DNA, 50 bp, Unknown
  Description of Unknown: Universal CpG sequence
atttactttgagggatccaactctactagcaactcctttgctttcatccg

SEQ ID NO: 3343 - DNA, 50 bp, Unknown
  Description of Unknown: Universal CpG sequence
ctgggcttcttgcagcgaattccacactcctcacaaacatatttccctcg

SEQ ID NO: 3344 - DNA, 50 bp, Unknown
  Description of Unknown: Universal CpG sequence
cgtccttgtctggcaaaatccaccatgcaatatttctgttagtaggtata

SEQ ID NO: 3345 - DNA, 50 bp, Unknown
  Description of Unknown: Universal CpG sequence
cggtctgtgctcctacgtgaaacccgagcaacattaaggctttcagggct

SEQ ID NO: 3346 - DNA, 50 bp, Unknown
  Description of Unknown: Universal CpG sequence
agaatgctttcattgtaaattcaggttacaaagaaactatacctgggccg

SEQ ID NO: 3347 - DNA, 50 bp, Unknown
  Description of Unknown: Universal CpG sequence
tgacagcactaactctccagggcagaactttccagtcaagtggatcaacg

SEQ ID NO: 3348 - DNA, 50 bp, Unknown
  Description of Unknown: Universal CpG sequence
ctataactattagtagtcatcgaactggtttgtttctggatggccgaacg

SEQ ID NO: 3349 - DNA, 50 bp, Unknown
  Description of Unknown: Universal CpG sequence
cagctggacggactcgggtgtggtttgcagctcggcgggcaaagcagccg

SEQ ID NO: 3350 - DNA, 50 bp, Unknown
  Description of Unknown: Universal CpG sequence
cgtagactttgaagccgtttttcttgcaaagggtgaaatcgaagcaggac

SEQ ID NO: 3351 - DNA, 50 bp, Unknown
  Description of Unknown: Universal CpG sequence
cggccggccttctgccgctgcccccttgtacagaatcgaactctgcactt

SEQ ID NO: 3352 - DNA, 50 bp, Unknown
  Description of Unknown: Universal CpG sequence
acgtgtcagtttcaatagtagtgtcaaagttcactatatacagacattcg

SEQ ID NO: 3353 - DNA, 50 bp, Unknown
  Description of Unknown: Universal CpG sequence
tttttggaaattcctcctttcaacaagcagtatacagaatcccagcttcg

SEQ ID NO: 3354 - DNA, 50 bp, Unknown
  Description of Unknown: Universal CpG sequence
acaaaaacacatacacaaaccggtcactgtcagactgtctgtgagaagcg

SEQ ID NO: 3355 - DNA, 50 bp, Unknown
  Description of Unknown: Universal CpG sequence
cgcctgagtgaatcaaaatgaatgtaaatgaggtttattaagtcaacccc

SEQ ID NO: 3356 - DNA, 50 bp, Unknown
  Description of Unknown: Universal CpG sequence
ccaggtctctgtggctgggctgctccagcctggcggacagcatgccttcg

SEQ ID NO: 3357 - DNA, 50 bp, Unknown
  Description of Unknown: Universal CpG sequence
ggctaccgtgcggagagcgggctgtaaatatttaaaaagtctctcgcgcg

SEQ ID NO: 3358 - DNA, 50 bp, Unknown
  Description of Unknown: Universal CpG sequence
acaaaatcaaaatattcatgaaacacaatgatatctccccaaagcagccg

SEQ ID NO: 3359 - DNA, 50 bp, Unknown
  Description of Unknown: Universal CpG sequence
tggcatttattctttatgtaggaatatttgttcctcaaagtcagactacg

SEQ ID NO: 3360 - DNA, 50 bp, Unknown
  Description of Unknown: Universal CpG sequence
ttagaagccttaccagcagggaagcctgcatcttttaaaaacaaaactcg

SEQ ID NO: 3361 - DNA, 50 bp, Unknown
  Description of Unknown: Universal CpG sequence
tctgggggctcagccaccgggggatttaaacagtacatgtgatagcctcg

SEQ ID NO: 3362 - DNA, 50 bp, Unknown
  Description of Unknown: Universal CpG sequence
gcactccggcaggtacggctacggctacaatggcatggatctcagcgtcg

SEQ ID NO: 3363 - DNA, 50 bp, Unknown
  Description of Unknown: Universal CpG sequence
cgtctgcaaggcagtaaaatgttatgtatttgcaaggcccataatcttta

SEQ ID NO: 3364 - DNA, 50 bp, Unknown
  Description of Unknown: Universal CpG sequence
cgtgggcgactcggtaacgtctgacaaccttcaaagaaaggagaaaacaa

SEQ ID NO: 3365 - DNA, 50 bp, Unknown
  Description of Unknown: Universal CpG sequence
cgtccctcagaggggaagccatcctgtggctctggcccccccaccacccc

SEQ ID NO: 3366 - DNA, 50 bp, Unknown
  Description of Unknown: Universal CpG sequence
aattcgattttaatttcatagcagagcagttgattcatggctctttgtcg

SEQ ID NO: 3367 - DNA, 50 bp, Unknown
  Description of Unknown: Universal CpG sequence
tcggagaagatcatcatcaacgtgggcggcacgcgacatgagacctaccg

SEQ ID NO: 3368 - DNA, 50 bp, Unknown
  Description of Unknown: Universal CpG sequence
cggccccaggctgatgttgtggtaatctaatcagctcgggtcctccacac

SEQ ID NO: 3369 - DNA, 50 bp, Unknown
  Description of Unknown: Universal CpG sequence
cgaccctgggagtataaccaacgaggtgattcaggaatgaatctgaaaga

SEQ ID NO: 3370 - DNA, 50 bp, Unknown
  Description of Unknown: Universal CpG sequence
cgcccacttcattagaattctaattggggtgtgtaggagaggattctata

SEQ ID NO: 3371 - DNA, 50 bp, Unknown
  Description of Unknown: Universal CpG sequence
cgtacataaagaagggctgttaaactcttgttgagttatttttgttttgc

SEQ ID NO: 3372 - DNA, 50 bp, Unknown
  Description of Unknown: Universal CpG sequence
aagttaggcgggattatttgaaaggtatgtcacaatgcttgacctttacg

SEQ ID NO: 3373 - DNA, 50 bp, Unknown
  Description of Unknown: Universal CpG sequence
cgcatgagttgctggcgtagcaagatgcgtgatgtcatactggaggagct

SEQ ID NO: 3374 - DNA, 50 bp, Unknown
  Description of Unknown: Universal CpG sequence
cgcctataaatgagaagcgagctattaacatttgtgtattttcattatgt

SEQ ID NO: 3375 - DNA, 50 bp, Unknown
  Description of Unknown: Universal CpG sequence
tccagataagagggcgtaccttccgaggggtcaagcctccgagccctccg

SEQ ID NO: 3376 - DNA, 50 bp, Unknown
  Description of Unknown: Universal CpG sequence
gtaagtaaattttctctggcgatcaaaagcctggtcggcaacaaagaccg

SEQ ID NO: 3377 - DNA, 50 bp, Unknown
  Description of Unknown: Universal CpG sequence
caaggagatctgcatgatcaaggtagagatccaggacatcaacgacaacg

SEQ ID NO: 3378 - DNA, 50 bp, Unknown
  Description of Unknown: Universal CpG sequence
gaaaactgtttatgggggctgtcgtcatctgtgcacaagctatttacacg

SEQ ID NO: 3379 - DNA, 50 bp, Unknown
  Description of Unknown: Universal CpG sequence
agaaggtttcaggtgggtgaaacctcctattccatgcgtaaggtgcctcg

SEQ ID NO: 3380 - DNA, 50 bp, Unknown
  Description of Unknown: Universal CpG sequence
cgtggcaattctctgaagcgtttacaagaagaaaccttgacaaaaatgtc

SEQ ID NO: 3381 - DNA, 50 bp, Unknown
  Description of Unknown: Universal CpG sequence
ccttcttctgtatgttcatttacacttctgccttcatctagcaatttacg

SEQ ID NO: 3382 - DNA, 50 bp, Unknown
  Description of Unknown: Universal CpG sequence
cggttttaattacagtgagggtttctctacaaatctgtacaagacagtgg

SEQ ID NO: 3383 - DNA, 50 bp, Unknown
  Description of Unknown: Universal CpG sequence
gaacaaaatgccgaccggaagtgcagctgcaggaatgactccctccgccg

SEQ ID NO: 3384 - DNA, 50 bp, Unknown
  Description of Unknown: Universal CpG sequence
cggcgctgcctcctggctacagttacaccagcctgccatactatacaggg

SEQ ID NO: 3385 - DNA, 50 bp, Unknown
  Description of Unknown: Universal CpG sequence
cgcccgtttgcaggtcgcgttttccgtaataacctttaatgcggctggcc

SEQ ID NO: 3386 - DNA, 50 bp, Unknown
  Description of Unknown: Universal CpG sequence
ctgcctttccccagcaccattaggaagttaaaatcggtcagtttcatccg

SEQ ID NO: 3387 - DNA, 50 bp, Unknown
  Description of Unknown: Universal CpG sequence
ggctaagtggacacttgattgaataccactaagacagctcacatcccacg

SEQ ID NO: 3388 - DNA, 50 bp, Unknown
  Description of Unknown: Universal CpG sequence
tgtgaataaaaccctggtcaaaagctctgtcacatcgcgctggcaagacg

SEQ ID NO: 3389 - DNA, 50 bp, Unknown
  Description of Unknown: Universal CpG sequence
cgccgccgtagttgctgctgccgcctgccggtcctctagcttcgacaaag

SEQ ID NO: 3390 - DNA, 50 bp, Unknown
  Description of Unknown: Universal CpG sequence
tttcactgagaaaattgtttagaattgcctcattcctcagcagattaacg

SEQ ID NO: 3391 - DNA, 50 bp, Unknown
  Description of Unknown: Universal CpG sequence
agaagatggtccggaaagcctggctggctaacaaagacaggccttcagcg

SEQ ID NO: 3392 - DNA, 50 bp, Unknown
  Description of Unknown: Universal CpG sequence
cgaccctgatacagtggcatcacccaaacctgtttcatccactgtttcag

SEQ ID NO: 3393 - DNA, 50 bp, Unknown
  Description of Unknown: Universal CpG sequence
agatgccgctccagggcttcatgtggaagacgaacatccagatggccacg

SEQ ID NO: 3394 - DNA, 50 bp, Unknown
  Description of Unknown: Universal CpG sequence
cgctggagaagacaagttagaagaaaggacatgaagcttccaacggctac

SEQ ID NO: 3395 - DNA, 50 bp, Unknown
  Description of Unknown: Universal CpG sequence
gtcatccgtcagagctagagagcaggacggttcagacacaatctctgacg

SEQ ID NO: 3396 - DNA, 50 bp, Unknown
  Description of Unknown: Universal CpG sequence
cgcgccagggacaggatgtagttacaggcgatcctcaggatggccagttt

SEQ ID NO: 3397 - DNA, 50 bp, Unknown
  Description of Unknown: Universal CpG sequence
cgctgatcgatatcttggtaaaatattcatttttaaactagcgggcagtg

SEQ ID NO: 3398 - DNA, 50 bp, Unknown
  Description of Unknown: Universal CpG sequence
gattggcagttccctggcccggcgccagcctattgggaggcctgtttacg

SEQ ID NO: 3399 - DNA, 50 bp, Unknown
  Description of Unknown: Universal CpG sequence
cgtcagtttggtgcatttgctgctgctgttgctactgtttgcctcaaacg

SEQ ID NO: 3400 - DNA, 50 bp, Unknown
  Description of Unknown: Universal CpG sequence
ggatcaatgctttattaacaagaaaatgtcttacttcacattcctgtgcg

SEQ ID NO: 3401 - DNA, 50 bp, Unknown
  Description of Unknown: Universal CpG sequence
caagcactatttgcaagcgggaggctcagaagcctcggcatttgtcagcg

SEQ ID NO: 3402 - DNA, 50 bp, Unknown
  Description of Unknown: Universal CpG sequence
tgtaattattctcttagcttgcccttcataaatttatctgcgttctatcg

SEQ ID NO: 3403 - DNA, 50 bp, Unknown
  Description of Unknown: Universal CpG sequence
cggctcgctggcccggaatagcttcactttctggcacacgaaatgcttct

SEQ ID NO: 3404 - DNA, 50 bp, Unknown
  Description of Unknown: Universal CpG sequence
gaacacaggggccttttaagttgagcgtgcgcactgcatgggaaatagcg

SEQ ID NO: 3405 - DNA, 50 bp, Unknown
  Description of Unknown: Universal CpG sequence
cgcccgcccggcgcacacacactcgcacacggacacacgctcacacccgc

SEQ ID NO: 3406 - DNA, 50 bp, Unknown
  Description of Unknown: Universal CpG sequence
cgctcagctgtgcccagagcgtgaggctggcagcgcctttaatcgccttt

SEQ ID NO: 3407 - DNA, 50 bp, Unknown
  Description of Unknown: Universal CpG sequence
cggtagaccaattagtgagctttctaaatgaagtaagctttttcatacat

SEQ ID NO: 3408 - DNA, 50 bp, Unknown
  Description of Unknown: Universal CpG sequence
gccccccggctaagtcatgtttaacagcctcagaaattatcttgtctccg

SEQ ID NO: 3409 - DNA, 50 bp, Unknown
  Description of Unknown: Universal CpG sequence
cggccccaacccacgcggaggccacgtgcacagctccaccatccacaccc

SEQ ID NO: 3410 - DNA, 50 bp, Unknown
  Description of Unknown: Universal CpG sequence
cgcatatttgagtggtagtccaaataaatgcaatatagaaatttatgttt

SEQ ID NO: 3411 - DNA, 50 bp, Unknown
  Description of Unknown: Universal CpG sequence
cgcagtcgggcagattgggttaaaccaaatattacaattgcaagaactca

SEQ ID NO: 3412 - DNA, 50 bp, Unknown
  Description of Unknown: Universal CpG sequence
ccagtgtcgccattgctcttccttcttgttgctttttccctgttccttcg

SEQ ID NO: 3413 - DNA, 50 bp, Unknown
  Description of Unknown: Universal CpG sequence
ttcgcagaggctacaggtcgaaaatagagcacggtgccagcttcacctcg

SEQ ID NO: 3414 - DNA, 50 bp, Unknown
  Description of Unknown: Universal CpG sequence
accggtcgaggacggcaggagacccccgagtgcagagaaagctcaaaccg

SEQ ID NO: 3415 - DNA, 50 bp, Unknown
  Description of Unknown: Universal CpG sequence
acagaacctccaccaactgacagtttctcttcttgacttgccacccatcg

SEQ ID NO: 3416 - DNA, 50 bp, Unknown
  Description of Unknown: Universal CpG sequence
ggaaggattcttgaagcccaagataaacaaattgttcctcttcacgtgcg

SEQ ID NO: 3417 - DNA, 50 bp, Unknown
  Description of Unknown: Universal CpG sequence
tatgcagcagcccagcgagttccactgcatgatgaactggacgcacatcg

SEQ ID NO: 3418 - DNA, 50 bp, Unknown
  Description of Unknown: Universal CpG sequence
gataaacaattccccaaatagattaaaacgaagtgtaacttacaaaggcg

SEQ ID NO: 3419 - DNA, 50 bp, Unknown
  Description of Unknown: Universal CpG sequence
ttaacagaaatcctatacactccactttgtcagcagttttgaattcatcg

SEQ ID NO: 3420 - DNA, 50 bp, Unknown
  Description of Unknown: Universal CpG sequence
cggagctggatcatgggttagttgaagtgatattttccgctaatggtagt

SEQ ID NO: 3421 - DNA, 50 bp, Unknown
  Description of Unknown: Universal CpG sequence
cggcgaataagtgggtcatgtctaataagctatttgtgttcaggaggaga

SEQ ID NO: 3422 - DNA, 50 bp, Unknown
  Description of Unknown: Universal CpG sequence
cggcacgtttttgcttataaaaaaagtgcaaaaaagatgtggtttacaag

SEQ ID NO: 3423 - DNA, 50 bp, Unknown
  Description of Unknown: Universal CpG sequence
cgcaggtgcaatatgaatcaattatcttaattaagattatgccgcaagcc

SEQ ID NO: 3424 - DNA, 50 bp, Unknown
  Description of Unknown: Universal CpG sequence
ccaggcaggacgacttgagcgcccgcgcattgtgcaggttaataaagtcg

SEQ ID NO: 3425 - DNA, 50 bp, Unknown
  Description of Unknown: Universal CpG sequence
ggcacacaggggttggactggttccctatacagatgtccttctggaaacg

SEQ ID NO: 3426 - DNA, 50 bp, Unknown
  Description of Unknown: Universal CpG sequence
cgtgccctgtgttacttatttgggagccgaaaatttatgcccagctgaaa

SEQ ID NO: 3427 - DNA, 50 bp, Unknown
  Description of Unknown: Universal CpG sequence
ttcagttttccaggccaggcagcccgctatccttggatggcctttccacg

SEQ ID NO: 3428 - DNA, 50 bp, Unknown
  Description of Unknown: Universal CpG sequence
tgaatatgctaaaatgcatatctctgatgcacctttaagccagaaaaacg

SEQ ID NO: 3429 - DNA, 50 bp, Unknown
  Description of Unknown: Universal CpG sequence
gctggattgccttttgcaattcttacttcaaggcatacccccttccaacg

SEQ ID NO: 3430 - DNA, 50 bp, Unknown
  Description of Unknown: Universal CpG sequence
cgcctcaatctaattaggggttaaaagaggccatgactgtgatgtgacag

SEQ ID NO: 3431 - DNA, 50 bp, Unknown
  Description of Unknown: Universal CpG sequence
cgtttatggcttaaaaccccaaatggctgattttttaaaagagagagaga

SEQ ID NO: 3432 - DNA, 50 bp, Unknown
  Description of Unknown: Universal CpG sequence
tctagagacaaagttctgtagtgcactgacttctatcatactcagagtcg

SEQ ID NO: 3433 - DNA, 50 bp, Unknown
  Description of Unknown: Universal CpG sequence
cgtcctaacccagcaaggctaggtcattaaagtggaaatgaattctttca

SEQ ID NO: 3434 - DNA, 50 bp, Unknown
  Description of Unknown: Universal CpG sequence
cgaagaccaactgctggaaaatctcactgtcaaatcctcaaggacattgt

SEQ ID NO: 3435 - DNA, 50 bp, Unknown
  Description of Unknown: Universal CpG sequence
tatccagcctgtgtttacataatctaatttaacaaagtctcaaataaacg

SEQ ID NO: 3436 - DNA, 50 bp, Unknown
  Description of Unknown: Universal CpG sequence
cgggctaaaagttcttccaacagctgtttgttttggccattaacatgtcc

SEQ ID NO: 3437 - DNA, 50 bp, Unknown
  Description of Unknown: Universal CpG sequence
cggtgctaagatgttctgaattagatttgaattacaaccgctaaatgccc

SEQ ID NO: 3438 - DNA, 50 bp, Unknown
  Description of Unknown: Universal CpG sequence
taatttactcgtgatctgttattaacccatcgggtttcgagctcttgtcg

SEQ ID NO: 3439 - DNA, 50 bp, Unknown
  Description of Unknown: Universal CpG sequence
ccgagtgcttgacagagataatctcagcaatcccacgggtgaccttatcg

SEQ ID NO: 3440 - DNA, 50 bp, Unknown
  Description of Unknown: Universal CpG sequence
cggaaaacacaggccagtcaaatgtttcttatgaactgttgacactatat

SEQ ID NO: 3441 - DNA, 50 bp, Unknown
  Description of Unknown: Universal CpG sequence
cgttccgggtaatcggttttcatagcacattcattctattaaagaggact

SEQ ID NO: 3442 - DNA, 50 bp, Unknown
  Description of Unknown: Universal CpG sequence
cgagaccagcatgaggtagaaaagaccatgccaatatttagccagggaat

SEQ ID NO: 3443 - DNA, 50 bp, Unknown
  Description of Unknown: Universal CpG sequence
cgctgtcaacaaaatgacaatcaagatgaatgaatcggatgcagtaagag

SEQ ID NO: 3444 - DNA, 50 bp, Unknown
  Description of Unknown: Universal CpG sequence
cggcttgaggaagacctgctggccccgcctgaggaattggacaacagcga

SEQ ID NO: 3445 - DNA, 50 bp, Unknown
  Description of Unknown: Universal CpG sequence
cacaattaaaggggcaacgcacagatttcaggcaccaaccagcagcttcg

SEQ ID NO: 3446 - DNA, 50 bp, Unknown
  Description of Unknown: Universal CpG sequence
cgaagcacaaatctcattagccacaggtcagtaaggcttggagagaaaaa

SEQ ID NO: 3447 - DNA, 50 bp, Unknown
  Description of Unknown: Universal CpG sequence
cgcgaagctctggaacaaggagagagccagtatccacatgcccctgccgc

SEQ ID NO: 3448 - DNA, 50 bp, Unknown
  Description of Unknown: Universal CpG sequence
cgctcctgaccttgcaggacagctaatccatccgcacatctatcttaatt

SEQ ID NO: 3449 - DNA, 50 bp, Unknown
  Description of Unknown: Universal CpG sequence
gggcctcagaaccctatggtagccatggcaaccagcccctttagacaccg

SEQ ID NO: 3450 - DNA, 50 bp, Unknown
  Description of Unknown: Universal CpG sequence
gtttgccattttgtgttgtccgaactccgcttgctcaggtagcctttgcg

SEQ ID NO: 3451 - DNA, 50 bp, Unknown
  Description of Unknown: Universal CpG sequence
gaaagcgcccaatagctcttgacacgcaaatgggttaacacaataaagcg

SEQ ID NO: 3452 - DNA, 50 bp, Unknown
  Description of Unknown: Universal CpG sequence
cggaaccggttgaaaccggttcagactgggagattccatctcggttgagt

SEQ ID NO: 3453 - DNA, 50 bp, Unknown
  Description of Unknown: Universal CpG sequence
ggagactgagtttgtggtggctgctgagcagggtctgtctgctgttgccg

SEQ ID NO: 3454 - DNA, 50 bp, Unknown
  Description of Unknown: Universal CpG sequence
cgcttgaagttgggtatcgcctttgtgagctttatgagcctatttttctg

SEQ ID NO: 3455 - DNA, 50 bp, Unknown
  Description of Unknown: Universal CpG sequence
tgggagcttttctttcagcaccacaacattgcacctagactttttaaacg

SEQ ID NO: 3456 - DNA, 50 bp, Unknown
  Description of Unknown: Universal CpG sequence
cgcgtttgcaggaggaggagtaaagcgatgattgtgtaattaaataataa

SEQ ID NO: 3457 - DNA, 50 bp, Unknown
  Description of Unknown: Universal CpG sequence
aacacctcccgaccaggaagtcatcaggaatattgaccaatcagaattcg

SEQ ID NO: 3458 - DNA, 50 bp, Unknown
  Description of Unknown: Universal CpG sequence
cgctctctcttgggctccttgcagtccttggcaatgtggccacctctacc

SEQ ID NO: 3459 - DNA, 50 bp, Unknown
  Description of Unknown: Universal CpG sequence
aaaaggccacctattctttgctgtccttcacaagaatgtatctgaagtcg

SEQ ID NO: 3460 - DNA, 50 bp, Unknown
  Description of Unknown: Universal CpG sequence
ctcgaggaatacctcaatacctcagacaaggcccttccaatatgtttacg

SEQ ID NO: 3461 - DNA, 50 bp, Unknown
  Description of Unknown: Universal CpG sequence
cggccccaggatcactccggcacactgggtcccgaggagttcaaagcctg

SEQ ID NO: 3462 - DNA, 50 bp, Unknown
  Description of Unknown: Universal CpG sequence
ggggccgggcgggggagccagtgccgagctcaggctgcacagtagcgacg

SEQ ID NO: 3463 - DNA, 50 bp, Unknown
  Description of Unknown: Universal CpG sequence
cggctgctctcacggctggtatcgcggctgcacccctgactcatgctggg

SEQ ID NO: 3464 - DNA, 50 bp, Unknown
  Description of Unknown: Universal CpG sequence
gtacccagacaaaacccggccacgtgtaaggtaattggcagtataacacg

SEQ ID NO: 3465 - DNA, 50 bp, Unknown
  Description of Unknown: Universal CpG sequence
ttataatgcagcattcttttggacaccacacctaggtcggagcactgtcg

SEQ ID NO: 3466 - DNA, 50 bp, Unknown
  Description of Unknown: Universal CpG sequence
cgagcccccccaaggctcagagcggtactggcttttaaagggaaaggcct

SEQ ID NO: 3467 - DNA, 50 bp, Unknown
  Description of Unknown: Universal CpG sequence
cggggctgcaacgtcataatctctagggaaatcctgccaagaaacgcaaa

SEQ ID NO: 3468 - DNA, 50 bp, Unknown
  Description of Unknown: Universal CpG sequence
caaacccacaatatatttacatcatatataatcttaactgtccagccacg

SEQ ID NO: 3469 - DNA, 50 bp, Unknown
  Description of Unknown: Universal CpG sequence
cgatacaaggacattaaagagcattaaactacttgatgacattttggtca

SEQ ID NO: 3470 - DNA, 50 bp, Unknown
  Description of Unknown: Universal CpG sequence
caatgatttaatacaacactgaggaacagctttctttagtctttaactcg

SEQ ID NO: 3471 - DNA, 50 bp, Unknown
  Description of Unknown: Universal CpG sequence
cgtgagggtgttttaatacctactcagaaattactcatgggtcggcttca

SEQ ID NO: 3472 - DNA, 50 bp, Unknown
  Description of Unknown: Universal CpG sequence
cgcaagcgagtcatcgcaacaacactcccgagaacattcttgttgggtaa

SEQ ID NO: 3473 - DNA, 50 bp, Unknown
  Description of Unknown: Universal CpG sequence
cgcctcatctggcagccgctttctggtccagcagacactaacatctaatg

SEQ ID NO: 3474 - DNA, 50 bp, Unknown
  Description of Unknown: Universal CpG sequence
cggcagcaggaaaattaattactggacgattttcacttcctcttgcagcg

SEQ ID NO: 3475 - DNA, 50 bp, Unknown
  Description of Unknown: Universal CpG sequence
atatggcatacagagcatttacatactcacatctgaaatactaggcaacg

SEQ ID NO: 3476 - DNA, 50 bp, Unknown
  Description of Unknown: Universal CpG sequence
cggtaactgaaggcgaccaattgagctgaacagagtgactcagaaataaa

SEQ ID NO: 3477 - DNA, 50 bp, Unknown
  Description of Unknown: Universal CpG sequence
ctgattgctgttctttttactatcaagggacactcttgcccagacagacg

SEQ ID NO: 3478 - DNA, 50 bp, Unknown
  Description of Unknown: Universal CpG sequence
cgcattgacctttgatcctccacccggacggtgtagggttccctgaaaac

SEQ ID NO: 3479 - DNA, 50 bp, Unknown
  Description of Unknown: Universal CpG sequence
cgacacgcgaacaattttatcaataggaccatgtaaaggccgactgtgag

SEQ ID NO: 3480 - DNA, 50 bp, Unknown
  Description of Unknown: Universal CpG sequence
gacttacggggactcaggcaagaccaagacggtgacccgtaaaaaatacg

SEQ ID NO: 3481 - DNA, 50 bp, Unknown
  Description of Unknown: Universal CpG sequence
cgagacattaatcttccaataggtctttaattaggacagatgcactaaat

SEQ ID NO: 3482 - DNA, 50 bp, Unknown
  Description of Unknown: Universal CpG sequence
cgcaactttgctgaaaaagtgtttgcctctgaagtcaaagatgaaggagg

SEQ ID NO: 3483 - DNA, 50 bp, Unknown
  Description of Unknown: Universal CpG sequence
ctggaggacacatggaccacattcatgaaggcccggctcaactgctcccg

SEQ ID NO: 3484 - DNA, 50 bp, Unknown
  Description of Unknown: Universal CpG sequence
cgtagagaattgcaaatcttgtcatggccacgcagaacagctcaagcatt

SEQ ID NO: 3485 - DNA, 50 bp, Unknown
  Description of Unknown: Universal CpG sequence
ggggaatagggcgtccctggcccacttagcttttcccccaactcctggcg

SEQ ID NO: 3486 - DNA, 50 bp, Unknown
  Description of Unknown: Universal CpG sequence
tttcaaggcggccatcttagtgcctcagctctgagaaatatttctgagcg

SEQ ID NO: 3487 - DNA, 50 bp, Unknown
  Description of Unknown: Universal CpG sequence
aacagccacgccctcatgatatttgtggctactttgggaaagatgccacg

SEQ ID NO: 3488 - DNA, 50 bp, Unknown
  Description of Unknown: Universal CpG sequence
cagactgccgctgtactggtaattcccctcacttgattgtgttactaacg

SEQ ID NO: 3489 - DNA, 50 bp, Unknown
  Description of Unknown: Universal CpG sequence
cgcctcaagaagtgcctcaaagtgggcatgaggcgggaaggtgaatattt

SEQ ID NO: 3490 - DNA, 50 bp, Unknown
  Description of Unknown: Universal CpG sequence
gaaatgagcgtggcacatgttgacataggaatgcatccagccataattcg

SEQ ID NO: 3491 - DNA, 50 bp, Unknown
  Description of Unknown: Universal CpG sequence
tctaataaccagaaaatcccctctgtgggtccaaaggctctggcgaatcg

SEQ ID NO: 3492 - DNA, 50 bp, Unknown
  Description of Unknown: Universal CpG sequence
cggtgccattgggagtcatggaattactatttatatgagagttaccgagt

SEQ ID NO: 3493 - DNA, 50 bp, Unknown
  Description of Unknown: Universal CpG sequence
cgcccggccacatgaccggcgccggccaatcgctggattcaaccactcat

SEQ ID NO: 3494 - DNA, 50 bp, Unknown
  Description of Unknown: Universal CpG sequence
atttcctcactttttataacttactttgatccggcctctctttgtcctcg

SEQ ID NO: 3495 - DNA, 50 bp, Unknown
  Description of Unknown: Universal CpG sequence
cgggtcatcttgcctgtcccgccggccaccaggcccaggcaagctgcccc

SEQ ID NO: 3496 - DNA, 50 bp, Unknown
  Description of Unknown: Universal CpG sequence
cgccaccaaatccatttggctctatttaggaactaagtacaggaaggtag

SEQ ID NO: 3497 - DNA, 50 bp, Unknown
  Description of Unknown: Universal CpG sequence
ctggggcacgaggcgctccctgggatcacatggtacctgctccagtgccg

SEQ ID NO: 3498 - DNA, 50 bp, Unknown
  Description of Unknown: Universal CpG sequence
ctgtgggaactggaggtaacagtctacagccatggtcgccccgcagcacg

SEQ ID NO: 3499 - DNA, 50 bp, Unknown
  Description of Unknown: Universal CpG sequence
cgatgtatctagcccttggcagggtgtcaaggacaagaaataatcagtct

SEQ ID NO: 3500 - DNA, 50 bp, Unknown
  Description of Unknown: Universal CpG sequence
cgcctcctagattaatgcagagaaagcggtattgtctgttgaatggataa

SEQ ID NO: 3501 - DNA, 50 bp, Unknown
  Description of Unknown: Universal CpG sequence
tgcttctcagagcgggggctttgtgcagcagtctgctcaacagagggacg

SEQ ID NO: 3502 - DNA, 50 bp, Unknown
  Description of Unknown: Universal CpG sequence
cgccatttcccgcctaccgacctgctgcaccgcacggacagggacccgga

SEQ ID NO: 3503 - DNA, 50 bp, Unknown
  Description of Unknown: Universal CpG sequence
cgccagattgtgtctcaagacacatatgatgaactgaacaaaatgacctg

SEQ ID NO: 3504 - DNA, 50 bp, Unknown
  Description of Unknown: Universal CpG sequence
ctttttctctaatgatctagttcctgtagaactggaatgcttatgtctcg

SEQ ID NO: 3505 - DNA, 50 bp, Unknown
  Description of Unknown: Universal CpG sequence
tgcctatcagaggctaataatactgcagcagcgtgttaattgcaaagacg

SEQ ID NO: 3506 - DNA, 50 bp, Unknown
  Description of Unknown: Universal CpG sequence
cgtcttaattttttgtaatcattttttgtaaagagggtataatgtcaggc

SEQ ID NO: 3507 - DNA, 50 bp, Unknown
  Description of Unknown: Universal CpG sequence
accttttccaatcccgggctgtatatggagatttgggattctttaaaccg

SEQ ID NO: 3508 - DNA, 50 bp, Unknown
  Description of Unknown: Universal CpG sequence
cgggcccacaatcactcaatattttaagagctgtcatcacaccagcatga

SEQ ID NO: 3509 - DNA, 50 bp, Unknown
  Description of Unknown: Universal CpG sequence
cgatgcctagagcaggaagaacagaggatgtcattttcattaatttctaa

SEQ ID NO: 3510 - DNA, 50 bp, Unknown
  Description of Unknown: Universal CpG sequence
taaaacaattttaaagtgattaagtagtttaacacctgtctcccgtcacg

SEQ ID NO: 3511 - DNA, 50 bp, Unknown
  Description of Unknown: Universal CpG sequence
tcaattcaagcgcatggccttgtgcaaggagcatgctccagcccttctcg

SEQ ID NO: 3512 - DNA, 50 bp, Unknown
  Description of Unknown: Universal CpG sequence
ctgtggctgctgcctgctgctcctcgcggcgaaaagcacaaagcacagcg

SEQ ID NO: 3513 - DNA, 50 bp, Unknown
  Description of Unknown: Universal CpG sequence
tcctcagagatgatgtacttatgcagacacaccatgttgggcacacagcg

SEQ ID NO: 3514 - DNA, 50 bp, Unknown
  Description of Unknown: Universal CpG sequence
cgcgtgttcttgtaagtgtgaccgaactgattacgatgcatatgtttaga

SEQ ID NO: 3515 - DNA, 50 bp, Unknown
  Description of Unknown: Universal CpG sequence
aattactcgctttattactttagcctggaggaatcctgtaaaaaacaacg

SEQ ID NO: 3516 - DNA, 50 bp, Unknown
  Description of Unknown: Universal CpG sequence
acaaagatccaactgtaaaaagtcttacgtaacagttcaggactacttcg

SEQ ID NO: 3517 - DNA, 50 bp, Unknown
  Description of Unknown: Universal CpG sequence
cggatgacagagtccaactttcccattacagctgttcgttcctttaagag

SEQ ID NO: 3518 - DNA, 50 bp, Unknown
  Description of Unknown: Universal CpG sequence
cgcaggaagaagaaagaatatgtcaaatgtcttgaaaatcgtgtggctgt

SEQ ID NO: 3519 - DNA, 50 bp, Unknown
  Description of Unknown: Universal CpG sequence
cgatagtgctttgaagtactggagtgcccagttcacatcagggcatgcgt

SEQ ID NO: 3520 - DNA, 50 bp, Unknown
  Description of Unknown: Universal CpG sequence
catggctacctggctggtttcagcgtgcgctcaggtcgcctggagagccg

SEQ ID NO: 3521 - DNA, 50 bp, Unknown
  Description of Unknown: Universal CpG sequence
cggcaaaggcgccagaaaaatctggagaattcatggacacaggcagttga

SEQ ID NO: 3522 - DNA, 50 bp, Unknown
  Description of Unknown: Universal CpG sequence
cggctggccagcaagggcacggagcctcaccccacaccggtaaccctctt

SEQ ID NO: 3523 - DNA, 50 bp, Unknown
  Description of Unknown: Universal CpG sequence
cgttcctaattgcaccgtggaatagatctcagaggaaagtaaatcgccat

SEQ ID NO: 3524 - DNA, 50 bp, Unknown
  Description of Unknown: Universal CpG sequence
aaagttgcacaatacagaaaactgttgctccatcttctactacataaacg

SEQ ID NO: 3525 - DNA, 50 bp, Unknown
  Description of Unknown: Universal CpG sequence
cggggatccagttacggctcgctcatgacagcccatgggaaataccagat

SEQ ID NO: 3526 - DNA, 50 bp, Unknown
  Description of Unknown: Universal CpG sequence
agggatttgacccattccgattcggagtcctccctccacatgagtgaccg

SEQ ID NO: 3527 - DNA, 50 bp, Unknown
  Description of Unknown: Universal CpG sequence
tccgccattttggctgcctctgtcggtctgttcagttaccacgtgaaccg

SEQ ID NO: 3528 - DNA, 50 bp, Unknown
  Description of Unknown: Universal CpG sequence
tcacctcgcctaatctagcagctaatatttattagagccaatttataccg

SEQ ID NO: 3529 - DNA, 50 bp, Unknown
  Description of Unknown: Universal CpG sequence
gcgctctttagcagacgggcttgcaaactctggtgataaatagactttcg

SEQ ID NO: 3530 - DNA, 50 bp, Unknown
  Description of Unknown: Universal CpG sequence
aattccacaaaagcaaaccgagttggctgagtctcatcacctgccatccg

SEQ ID NO: 3531 - DNA, 50 bp, Unknown
  Description of Unknown: Universal CpG sequence
cgccacagccaggtctgcagctccttcagcagccagaagtcgtccatctt

SEQ ID NO: 3532 - DNA, 50 bp, Unknown
  Description of Unknown: Universal CpG sequence
ccattctatatagtgtattaaagtcattttccacatgctacctcagcacg

SEQ ID NO: 3533 - DNA, 50 bp, Unknown
  Description of Unknown: Universal CpG sequence
ctcgcattgtgaccctttgatattaattcaaagggcaattaaagaatgcg

SEQ ID NO: 3534 - DNA, 50 bp, Unknown
  Description of Unknown: Universal CpG sequence
cgcaggtcgtctccaaacccaaaatttccacgtcggcaaaagtcaagatg

SEQ ID NO: 3535 - DNA, 50 bp, Unknown
  Description of Unknown: Universal CpG sequence
cgtgcggccctgactcacgtgcttccggtttgaaggcaaaaagtgtgcct

SEQ ID NO: 3536 - DNA, 50 bp, Unknown
  Description of Unknown: Universal CpG sequence
gttccactggtcagcacttcaatctggtatttacagaaatggtgacttcg

SEQ ID NO: 3537 - DNA, 50 bp, Unknown
  Description of Unknown: Universal CpG sequence
ataggagtagccacacctcttctgttacaaatcattaaaggtgttgaacg

SEQ ID NO: 3538 - DNA, 50 bp, Unknown
  Description of Unknown: Universal CpG sequence
cgagcaaaattgcatttgttttgcagatttgctcatcattaaatgtgaaa

SEQ ID NO: 3539 - DNA, 50 bp, Unknown
  Description of Unknown: Universal CpG sequence
agacacccacctgtatgagtacgcttgtggatcttgaggttctcggagcg

SEQ ID NO: 3540 - DNA, 50 bp, Unknown
  Description of Unknown: Universal CpG sequence
cgatgatcatgtggtataagagagatagatggcttttagttccatcctgt

SEQ ID NO: 3541 - DNA, 50 bp, Unknown
  Description of Unknown: Universal CpG sequence
cggtacgcgggagccctgagcttctgcggctggaatgaaccaagtgtccg

SEQ ID NO: 3542 - DNA, 50 bp, Unknown
  Description of Unknown: Universal CpG sequence
cgcctgagcctcaagagacttgaggttgttggtgacattcttcagctcct

SEQ ID NO: 3543 - DNA, 50 bp, Unknown
  Description of Unknown: Universal CpG sequence
cgggatcccaagaggcactgaggtcaagcttcgctcattacagtagacaa

SEQ ID NO: 3544 - DNA, 50 bp, Unknown
  Description of Unknown: Universal CpG sequence
cgagggcaaaagtgcttgatttctggataccacatgcttttcacatgatt

SEQ ID NO: 3545 - DNA, 50 bp, Unknown
  Description of Unknown: Universal CpG sequence
cggagccacaaggacagatgtaggcagcgtcccactgatatcatctagaa

SEQ ID NO: 3546 - DNA, 50 bp, Unknown
  Description of Unknown: Universal CpG sequence
cgcttgaattcactgaaccaggagcccgggttttctttgggccaagaagt

SEQ ID NO: 3547 - DNA, 50 bp, Unknown
  Description of Unknown: Universal CpG sequence
tctggccgtggtaatacgttccctgcgggcagctgactgagggagagtcg

SEQ ID NO: 3548 - DNA, 50 bp, Unknown
  Description of Unknown: Universal CpG sequence
tgggattccgatgaatctcctgaggcctcccctggtcctccaggcccacg

SEQ ID NO: 3549 - DNA, 50 bp, Unknown
  Description of Unknown: Universal CpG sequence
cgaaacaactgtggtgataaatccgcctgcagataattggcaagaaaaca

SEQ ID NO: 3550 - DNA, 50 bp, Unknown
  Description of Unknown: Universal CpG sequence
gcctgtcattctaccatttgtctcttccgacagcaaggtctggtagtacg

SEQ ID NO: 3551 - DNA, 50 bp, Unknown
  Description of Unknown: Universal CpG sequence
cgcccttcgaatacttggataaaggagtccatttagcaaattacctgctt

SEQ ID NO: 3552 - DNA, 50 bp, Unknown
  Description of Unknown: Universal CpG sequence
cgtcctgtggctgaaccagaggaagagggtgtgagatcagggttccacta

SEQ ID NO: 3553 - DNA, 50 bp, Unknown
  Description of Unknown: Universal CpG sequence
ggtccaggtctgaggacatcacctaaacaaagggccactcagaaacttcg

SEQ ID NO: 3554 - DNA, 50 bp, Unknown
  Description of Unknown: Universal CpG sequence
cagccattgtagtgtatgcgctgcccctgcagcccaacttgcagctgccg

SEQ ID NO: 3555 - DNA, 50 bp, Unknown
  Description of Unknown: Universal CpG sequence
cgttaatactcttagacaacacagatctgaaatggtgaaaccagcaattc

SEQ ID NO: 3556 - DNA, 50 bp, Unknown
  Description of Unknown: Universal CpG sequence
cgcctctttggtggtaggtttcgaccaaaagaattggaagagctatgatt

SEQ ID NO: 3557 - DNA, 50 bp, Unknown
  Description of Unknown: Universal CpG sequence
gcagtatgacgacggcttaaaaatctggttggcagcaccccgagagaacg

SEQ ID NO: 3558 - DNA, 50 bp, Unknown
  Description of Unknown: Universal CpG sequence
cgcggaaatttgaaatatttggacaggaagagaaaagaaaagaaacctta

SEQ ID NO: 3559 - DNA, 50 bp, Unknown
  Description of Unknown: Universal CpG sequence
cgacagggagagtagtaaaactgccccttaagatggcttttaataggaag

SEQ ID NO: 3560 - DNA, 50 bp, Unknown
  Description of Unknown: Universal CpG sequence
cggtgaatcacctaattaaaatcaagacatgaattaagcatccatttttg

SEQ ID NO: 3561 - DNA, 50 bp, Unknown
  Description of Unknown: Universal CpG sequence
cgtgaaccaattggagaactttagaaaattggatcagcctcaatagtcac

SEQ ID NO: 3562 - DNA, 50 bp, Unknown
  Description of Unknown: Universal CpG sequence
tctcgagacagcagcatcaatcaccacattttcattattaagtaacatcg

SEQ ID NO: 3563 - DNA, 50 bp, Unknown
  Description of Unknown: Universal CpG sequence
tacctgaccattgaccctgcaggtaactcacgtagtgctccacctacacg

SEQ ID NO: 3564 - DNA, 50 bp, Unknown
  Description of Unknown: Universal CpG sequence
acagggtcaatacacagccaaaagcatatactcaggattaacatatcacg

SEQ ID NO: 3565 - DNA, 50 bp, Unknown
  Description of Unknown: Universal CpG sequence
cgtggagcctctgaggaggtgatgcaatttcattttcattgatcagaaat

SEQ ID NO: 3566 - DNA, 50 bp, Unknown
  Description of Unknown: Universal CpG sequence
cactttaaaagctacatacctagttctttttaatataggctattcttacg

SEQ ID NO: 3567 - DNA, 50 bp, Unknown
  Description of Unknown: Universal CpG sequence
ctctctcattcccagagtgcatatcgggaatagacacacaaagacatgcg

SEQ ID NO: 3568 - DNA, 50 bp, Unknown
  Description of Unknown: Universal CpG sequence
cgcccggagcctcacaaaagaacaggatgttgttgatttgtcaccaaacc

SEQ ID NO: 3569 - DNA, 50 bp, Unknown
  Description of Unknown: Universal CpG sequence
cgcgaatgccatgcccagttcatttcctctaaggaaacacaacctcgggg

SEQ ID NO: 3570 - DNA, 50 bp, Unknown
  Description of Unknown: Universal CpG sequence
gaggtcagatttggagcttctcattgcacgcggagattattattgcatcg

SEQ ID NO: 3571 - DNA, 50 bp, Unknown
  Description of Unknown: Universal CpG sequence
agcccctgcattgcagagggactggagatctgtatgatctgtttatttcg

SEQ ID NO: 3572 - DNA, 50 bp, Unknown
  Description of Unknown: Universal CpG sequence
gaaaactcacccagagaaattttgcaagcatattattttccaatgtttcg

SEQ ID NO: 3573 - DNA, 50 bp, Unknown
  Description of Unknown: Universal CpG sequence
cgactttccgattcactgctcctgaaataattttgtgtattaaaacctga

SEQ ID NO: 3574 - DNA, 50 bp, Unknown
  Description of Unknown: Universal CpG sequence
aagatatcataggagggtcgctgtttgacgcagcgccgagctgacttgcg

SEQ ID NO: 3575 - DNA, 50 bp, Unknown
  Description of Unknown: Universal CpG sequence
gctctgaactttattttccgagtttgaggaaaattatattccatcgatcg

SEQ ID NO: 3576 - DNA, 50 bp, Unknown
  Description of Unknown: Universal CpG sequence
cggcgtgggtggggttgacaagaatagagtacattatgcagttcatttag

SEQ ID NO: 3577 - DNA, 50 bp, Unknown
  Description of Unknown: Universal CpG sequence
cgccatggggtccccatctcagtcactggcattgcccaggtgaagctttc

SEQ ID NO: 3578 - DNA, 50 bp, Unknown
  Description of Unknown: Universal CpG sequence
gtcacccttgtcacagttattgaaattccgcaactcgccacaccaggacg

SEQ ID NO: 3579 - DNA, 50 bp, Unknown
  Description of Unknown: Universal CpG sequence
cgtttttctcgaagtttaattaccgtatgctaatttccttgcctactacg

SEQ ID NO: 3580 - DNA, 50 bp, Unknown
  Description of Unknown: Universal CpG sequence
tttctttttgggggctggatgtgttcctggcagggccgatgatggatgcg

SEQ ID NO: 3581 - DNA, 50 bp, Unknown
  Description of Unknown: Universal CpG sequence
ttttcctctcagctatcaaatgtcactgccttgaaacgtgggccctttcg

SEQ ID NO: 3582 - DNA, 50 bp, Unknown
  Description of Unknown: Universal CpG sequence
tcatccatgcactttaattgaagaactgcactttttttacttcgtcttcg

SEQ ID NO: 3583 - DNA, 50 bp, Unknown
  Description of Unknown: Universal CpG sequence
tacatttactgacattcatcgcatctttgacattgattatctgatcaacg

SEQ ID NO: 3584 - DNA, 50 bp, Unknown
  Description of Unknown: Universal CpG sequence
cgtgtcagaatcttttaaacagagcatggtgttgcgtttattcgaacaaa

SEQ ID NO: 3585 - DNA, 50 bp, Unknown
  Description of Unknown: Universal CpG sequence
ttgaagggtgttaacctacccaacagcccgtgaagagttaagtaaatgcg

SEQ ID NO: 3586 - DNA, 50 bp, Unknown
  Description of Unknown: Universal CpG sequence
cattttgagaattgcatcagactaaaactgattacagatattaagcaacg

SEQ ID NO: 3587 - DNA, 50 bp, Unknown
  Description of Unknown: Universal CpG sequence
cactgagaagtttactgatttctcccagtggaatctgctggaatttatcg

SEQ ID NO: 3588 - DNA, 50 bp, Unknown
  Description of Unknown: Universal CpG sequence
cggtgtgaaataacgggcccatataaatccctctgccgcccgcctgcaag

SEQ ID NO: 3589 - DNA, 50 bp, Unknown
  Description of Unknown: Universal CpG sequence
acgcacctgtgatactgcgcctgcaggaactggaattcctctttaatccg

SEQ ID NO: 3590 - DNA, 50 bp, Unknown
  Description of Unknown: Universal CpG sequence
cgctctttaaatctggatattagtgcaggagagacggtcttgtagaattc

SEQ ID NO: 3591 - DNA, 50 bp, Unknown
  Description of Unknown: Universal CpG sequence
gtaatttctccctggccctgtctgcatcagcactattctcgaaagttacg

SEQ ID NO: 3592 - DNA, 50 bp, Unknown
  Description of Unknown: Universal CpG sequence
cattaaagccacttttcctctcagctatcaaatgtcactgccttgaaacg

SEQ ID NO: 3593 - DNA, 50 bp, Unknown
  Description of Unknown: Universal CpG sequence
aatatagacggctaatgtcttcagtatgtatgaaatatcccatatgctcg

SEQ ID NO: 3594 - DNA, 50 bp, Unknown
  Description of Unknown: Universal CpG sequence
ttaatttgacaccttctgttctaaaccctttgtttctattcaaaatcacg

SEQ ID NO: 3595 - DNA, 50 bp, Unknown
  Description of Unknown: Universal CpG sequence
cggtcacccgcagcgcctgaagaggcttcccgtccagagtcacctcctcc

SEQ ID NO: 3596 - DNA, 50 bp, Unknown
  Description of Unknown: Universal CpG sequence
cccagactatttccatcctctgattctcattccaagtgcatcactcgacg

SEQ ID NO: 3597 - DNA, 50 bp, Unknown
  Description of Unknown: Universal CpG sequence
cgctattttaacttcaaatactgaagaacgcctgataaggctgaaaagaa

SEQ ID NO: 3598 - DNA, 50 bp, Unknown
  Description of Unknown: Universal CpG sequence
cggcccccccctcggagaacagtaaggaccctactggagaagcagaattg

SEQ ID NO: 3599 - DNA, 50 bp, Unknown
  Description of Unknown: Universal CpG sequence
ctttgatttaccttcttcgaatgccaaatggagacaggtgataaagaacg

SEQ ID NO: 3600 - DNA, 50 bp, Unknown
  Description of Unknown: Universal CpG sequence
gtggaatatcaatttttattgcatcacctgtcaggagtgtccaatcagcg

SEQ ID NO: 3601 - DNA, 50 bp, Unknown
  Description of Unknown: Universal CpG sequence
ctagttcaaccatgtccttgttttattctcgaggaaccacctgtgaaacg

SEQ ID NO: 3602 - DNA, 50 bp, Unknown
  Description of Unknown: Universal CpG sequence
gagctgcacacggcactggaagtcaccaccaggccctggggcttcacacg

SEQ ID NO: 3603 - DNA, 50 bp, Unknown
  Description of Unknown: Universal CpG sequence
cggcatgtggaaattgacttcccttgatttaagctgctgtgtcttttcat

SEQ ID NO: 3604 - DNA, 50 bp, Unknown
  Description of Unknown: Universal CpG sequence
tctatgatctacctcaggggaatggcttttgcctcggacagctcaattcg

SEQ ID NO: 3605 - DNA, 50 bp, Unknown
  Description of Unknown: Universal CpG sequence
cgctaagtcctcgccctgtttcttagcgccggatcctggggaccagacac

SEQ ID NO: 3606 - DNA, 50 bp, Unknown
  Description of Unknown: Universal CpG sequence
ggggcgcgaaggccgcggggaaacgcttgtgcaggcggtagtccttctcg

SEQ ID NO: 3607 - DNA, 50 bp, Unknown
  Description of Unknown: Universal CpG sequence
cgcgtccaaactttaaaataaggaaataccagagaaaatgatctcaataa

SEQ ID NO: 3608 - DNA, 50 bp, Unknown
  Description of Unknown: Universal CpG sequence
cgcccccggagacccacaattggtccaaaaagcgtaaaatcagcaatcaa

SEQ ID NO: 3609 - DNA, 50 bp, Unknown
  Description of Unknown: Universal CpG sequence
cgagaaggttaaataaataagagagaaagaacacccttggcagaaagcac

SEQ ID NO: 3610 - DNA, 50 bp, Unknown
  Description of Unknown: Universal CpG sequence
ttctaatgctttcataaatccagtctctccattatgtggaatatcagtcg

SEQ ID NO: 3611 - DNA, 50 bp, Unknown
  Description of Unknown: Universal CpG sequence
cgtcgttatcttttgcaaaatacagccctggagatctttatggcaaacag

SEQ ID NO: 3612 - DNA, 50 bp, Unknown
  Description of Unknown: Universal CpG sequence
gagcaagcaggaatactacatccgggtcctaatgtccattgccatttgcg

SEQ ID NO: 3613 - DNA, 50 bp, Unknown
  Description of Unknown: Universal CpG sequence
atcccgtctctttgccttttatttttggcggcctcctttcgaaaactccg

SEQ ID NO: 3614 - DNA, 50 bp, Unknown
  Description of Unknown: Universal CpG sequence
cgagaaggttcacacaccccctctattcattcctcttccacaggtgtgcg

SEQ ID NO: 3615 - DNA, 50 bp, Unknown
  Description of Unknown: Universal CpG sequence
gcagctccactcctgaagaccttcagcttcttgggctttgagattgtacg

SEQ ID NO: 3616 - DNA, 50 bp, Unknown
  Description of Unknown: Universal CpG sequence
cgccaggctggagcagcccagccacagagacctgggcatagagcactgca

SEQ ID NO: 3617 - DNA, 50 bp, Unknown
  Description of Unknown: Universal CpG sequence
cgcacgcgctcccatataatttatgactgcctctggtcctgatgacagat

SEQ ID NO: 3618 - DNA, 50 bp, Unknown
  Description of Unknown: Universal CpG sequence
cgcgttcacataatacgaagaactcataattttgacctgtgatttgttgt

SEQ ID NO: 3619 - DNA, 50 bp, Unknown
  Description of Unknown: Universal CpG sequence
gaggctctccagcgccaccttggggtcgtgcaggaagtgcgtggtctgcg

SEQ ID NO: 3620 - DNA, 50 bp, Unknown
  Description of Unknown: Universal CpG sequence
ggagctgaagctgatggctcctcggcggctgaggacgtgctgggggaccg

SEQ ID NO: 3621 - DNA, 50 bp, Unknown
  Description of Unknown: Universal CpG sequence
caaaggaccctccaacttaaccagcgtcattgtccatttaacccacatcg

SEQ ID NO: 3622 - DNA, 50 bp, Unknown
  Description of Unknown: Universal CpG sequence
gctctgtgcactgagagactgtatcccctcagttggcaggcagagctccg

SEQ ID NO: 3623 - DNA, 50 bp, Unknown
  Description of Unknown: Universal CpG sequence
cgctcagatgcagcagcaccatgttcacgagagtacatgggctgtcctat

SEQ ID NO: 3624 - DNA, 50 bp, Unknown
  Description of Unknown: Universal CpG sequence
cccagctctcttttttttcctgatcagctgatgaagagactagcagctcg

SEQ ID NO: 3625 - DNA, 50 bp, Unknown
  Description of Unknown: Universal CpG sequence
cgtgaacttccatatcaagaagccctccaagtacccacatgtgccccctc

SEQ ID NO: 3626 - DNA, 50 bp, Unknown
  Description of Unknown: Universal CpG sequence
cggtaatgtataataaccctttgggcaagaaacccagtccccgcagcagc

SEQ ID NO: 3627 - DNA, 50 bp, Unknown
  Description of Unknown: Universal CpG sequence
cgttgattatgtttcgattttcgttcaagggcctctgctgttcgttcttt

SEQ ID NO: 3628 - DNA, 50 bp, Unknown
  Description of Unknown: Universal CpG sequence
cgccataagtgcccccagaacttcagcgcccaccatggcgcacaaggccg

SEQ ID NO: 3629 - DNA, 50 bp, Unknown
  Description of Unknown: Universal CpG sequence
cgggaatcctctccaaagaaggaggagactgtagcaagtaaggcatagag

SEQ ID NO: 3630 - DNA, 50 bp, Unknown
  Description of Unknown: Universal CpG sequence
cgctgtttggatttcctgattttataacagggcggctggttaatatctca

SEQ ID NO: 3631 - DNA, 50 bp, Unknown
  Description of Unknown: Universal CpG sequence
acaacccagtttaaataagagtctctgaaacttcgctctcagccacagcg

SEQ ID NO: 3632 - DNA, 50 bp, Unknown
  Description of Unknown: Universal CpG sequence
gtaaacgtacctgtccacagcccggggcattgcacacaaacggtctgtcg

SEQ ID NO: 3633 - DNA, 50 bp, Unknown
  Description of Unknown: Universal CpG sequence
cgagagcaaccccttcaccgaaatagccatgagcagctgcaggtacaacg

SEQ ID NO: 3634 - DNA, 50 bp, Unknown
  Description of Unknown: Universal CpG sequence
cggttcacagacctcttgaaggaaagtttgttttccactcatagatgaaa

SEQ ID NO: 3635 - DNA, 50 bp, Unknown
  Description of Unknown: Universal CpG sequence
cgggtttccagtgggcgcatcagttacaatgacatgtttgagatgctgaa

SEQ ID NO: 3636 - DNA, 50 bp, Unknown
  Description of Unknown: Universal CpG sequence
cgacaatgacagcagcatctggaactacccgcccaaccgggagatctcca

SEQ ID NO: 3637 - DNA, 50 bp, Unknown
  Description of Unknown: Universal CpG sequence
cggaccaccagtttccaataaaccataaaaggccgatcagcagccattgt

SEQ ID NO: 3638 - DNA, 50 bp, Unknown
  Description of Unknown: Universal CpG sequence
tgcaatcagtttccgaaaggtcagccaaggtcctccggctctcgcagacg

SEQ ID NO: 3639 - DNA, 50 bp, Unknown
  Description of Unknown: Universal CpG sequence
gaacaaaatccaccaacacggttccagtaacctccgcatgtccgaaaacg

SEQ ID NO: 3640 - DNA, 50 bp, Unknown
  Description of Unknown: Universal CpG sequence
ggttgtttatgcacacacaaggccctttgaaaataacccttttcatgtcg

SEQ ID NO: 3641 - DNA, 50 bp, Unknown
  Description of Unknown: Universal CpG sequence
caagtggaacagaattccctatggtcaaattaagtgatctctttatttcg

SEQ ID NO: 3642 - DNA, 50 bp, Unknown
  Description of Unknown: Universal CpG sequence
cggggagataaaactctcatagccctaactgtcaaatagggcccttttca

SEQ ID NO: 3643 - DNA, 50 bp, Unknown
  Description of Unknown: Universal CpG sequence
cgcggatggaagacaggcatgcagaggaaatcaaacctacaaccgcgaca

SEQ ID NO: 3644 - DNA, 50 bp, Unknown
  Description of Unknown: Universal CpG sequence
cggtgatttacttccctgcaaatgagttgtttcatattttgcactgtctt

SEQ ID NO: 3645 - DNA, 50 bp, Unknown
  Description of Unknown: Universal CpG sequence
cggatgttatttgtacgaagggcagttcgtaaacagcacttgttctttta

SEQ ID NO: 3646 - DNA, 50 bp, Unknown
  Description of Unknown: Universal CpG sequence
ttttcaggtcctgcaacaccatacccacactgcagccatttagcatgtcg

SEQ ID NO: 3647 - DNA, 50 bp, Unknown
  Description of Unknown: Universal CpG sequence
gtgattttgctaaaatgcatcaccaacagcgaatggctgccttagggacg

SEQ ID NO: 3648 - DNA, 50 bp, Unknown
  Description of Unknown: Universal CpG sequence
ggaaacttgctgtgggtgaccatggcgcacggagccagcgtggatctgcg

SEQ ID NO: 3649 - DNA, 50 bp, Unknown
  Description of Unknown: Universal CpG sequence
tcctaaagaaacttcagcagtgctgtgtcatttttgacttcatggacacg

SEQ ID NO: 3650 - DNA, 50 bp, Unknown
  Description of Unknown: Universal CpG sequence
cggccaattcacctgcgagggctgcaaaagtttcttcaagaggagcgtcc

SEQ ID NO: 3651 - DNA, 50 bp, Unknown
  Description of Unknown: Universal CpG sequence
ttcactttcacagacatgaaccaccacgctgggtgtcgactctgttcccg

SEQ ID NO: 3652 - DNA, 50 bp, Unknown
  Description of Unknown: Universal CpG sequence
agcagccattagcacgtcattggtaatcccagcgacacctttcacatccg

SEQ ID NO: 3653 - DNA, 50 bp, Unknown
  Description of Unknown: Universal CpG sequence
cggagcctgcctccagactgttggcgttcacggctctgcctcgcagcctc

SEQ ID NO: 3654 - DNA, 50 bp, Unknown
  Description of Unknown: Universal CpG sequence
cgtgcccacggtcaccgcgatcacaaccagccaggacctccagtggcttg

SEQ ID NO: 3655 - DNA, 50 bp, Unknown
  Description of Unknown: Universal CpG sequence
ctcagagcacaattgcgtttcctgcgggttatttttggcgtgggaacgcg

SEQ ID NO: 3656 - DNA, 50 bp, Unknown
  Description of Unknown: Universal CpG sequence
cgcgctgcagccccccgctccggagcggccacttgtccagcacctttacc

SEQ ID NO: 3657 - DNA, 50 bp, Unknown
  Description of Unknown: Universal CpG sequence
gtgggcgggatttcccgggtaacagagaagcggccgcggcggtagaggcg

SEQ ID NO: 3658 - DNA, 50 bp, Unknown
  Description of Unknown: Universal CpG sequence
cggcagtactggcactggttgcgatggtgctggtcgatgggacagttccg

SEQ ID NO: 3659 - DNA, 50 bp, Unknown
  Description of Unknown: Universal CpG sequence
cggactgggatattaaatatacgacacatccaggagtttattggagcgca

SEQ ID NO: 3660 - DNA, 50 bp, Unknown
  Description of Unknown: Universal CpG sequence
cgtggccgccatattcaacgaggccgtcctcgcaaatactgccccgatga

SEQ ID NO: 3661 - DNA, 50 bp, Unknown
  Description of Unknown: Universal CpG sequence
cgccaccatcgaccagtgccccacgcgcatcgaggagacctcgcccatcg

SEQ ID NO: 3662 - DNA, 50 bp, Unknown
  Description of Unknown: Universal CpG sequence
cgcggggcgccccattgactgggccccgagccccacttttcacaaactcc

SEQ ID NO: 3663 - DNA, 50 bp, Unknown
  Description of Unknown: Universal CpG sequence
caacacccaccggtaagaacaggaggtatttatatccaatttaattatcg

SEQ ID NO: 3664 - DNA, 50 bp, Unknown
  Description of Unknown: Universal CpG sequence
cgaggattttataatggcatattttttcagtattaaagcgaaaatgtttt

SEQ ID NO: 3665 - DNA, 50 bp, Unknown
  Description of Unknown: Universal CpG sequence
gacgaagcggctcctctgaaccccgggatgtacagtcagaaggcggctcg

SEQ ID NO: 3666 - DNA, 50 bp, Unknown
  Description of Unknown: Universal CpG sequence
cggcccatctccgaccgcttcctgatgcgagtcaacgagtcgtcctggca

SEQ ID NO: 3667 - DNA, 50 bp, Unknown
  Description of Unknown: Universal CpG sequence
accaagtcctgtaacatgcctggtattcccagttatcctcaccttccgcg

SEQ ID NO: 3668 - DNA, 50 bp, Unknown
  Description of Unknown: Universal CpG sequence
atttcctagcaggttttcacggaccctagcaaccttcagcggcacattcg

SEQ ID NO: 3669 - DNA, 50 bp, Unknown
  Description of Unknown: Universal CpG sequence
cggcacctccatggtcaccgggatgatgagcgcatccatcttgggctcgt

SEQ ID NO: 3670 - DNA, 50 bp, Unknown
  Description of Unknown: Universal CpG sequence
cgatggagtcgtatgatgcccttgccttgttttatattggctgtcagcgc

SEQ ID NO: 3671 - DNA, 50 bp, Unknown
  Description of Unknown: Universal CpG sequence
ttcccacagtaacaatcgaaagccacggttgccctggagacgcgggggcg

SEQ ID NO: 3672 - DNA, 50 bp, Unknown
  Description of Unknown: Universal CpG sequence
cggacccgacacacgctcacctggctgaggcccccgccccccacaggcag

SEQ ID NO: 3673 - DNA, 50 bp, Unknown
  Description of Unknown: Universal CpG sequence
cgccattcgacacaagccgctgaacatgtcatcccgtttttcacccaggg

SEQ ID NO: 3674 - DNA, 50 bp, Unknown
  Description of Unknown: Universal CpG sequence
cggctcgcgctttgtatactttgcacttgaaatcgttacattcaactgaa

SEQ ID NO: 3675 - DNA, 50 bp, Unknown
  Description of Unknown: Universal CpG sequence
cgccagtgaccctggcagctggtggggagggtgtcctccgcctagcctca

SEQ ID NO: 3676 - DNA, 50 bp, Unknown
  Description of Unknown: Universal CpG sequence
cggccacccctcgcaccacgtaccccgcggcctctttgttgttgggcacc

SEQ ID NO: 3677 - DNA, 50 bp, Unknown
  Description of Unknown: Universal CpG sequence
cgccgccattttgtgtccccctgttgttgtcgttgacatgaatccgacat

SEQ ID NO: 3678 - DNA, 50 bp, Unknown
  Description of Unknown: Universal CpG sequence
atacagcgctcagcttcatccttgttggattccatggcggaaccagaacg

SEQ ID NO: 3679 - DNA, 50 bp, Unknown
  Description of Unknown: Universal CpG sequence
cgccatttgaaatgctaacacaatgaatattttctcattggtctgtgtcc

SEQ ID NO: 3680 - DNA, 50 bp, Unknown
  Description of Unknown: Universal CpG sequence
cccatcaaaaaacttctattagtaatggagacctcgccggagaccttccg

SEQ ID NO: 3681 - DNA, 50 bp, Unknown
  Description of Unknown: Universal CpG sequence
ctcgccttaatcaattagttcgtgatttgctgcagacccctgtctctccg

SEQ ID NO: 3682 - DNA, 50 bp, Unknown
  Description of Unknown: Universal CpG sequence
aattatgctgaaataaaggccattcaatttgctacaatcagtaactttcg

SEQ ID NO: 3683 - DNA, 50 bp, Unknown
  Description of Unknown: Universal CpG sequence
tttcttctagctacttaaaggcattactgaattatgggcatcacaaaacg

SEQ ID NO: 3684 - DNA, 50 bp, Unknown
  Description of Unknown: Universal CpG sequence
caagatggtccagagcgacttcatgcagggggccatggccgccagcaacg

SEQ ID NO: 3685 - DNA, 50 bp, Unknown
  Description of Unknown: Universal CpG sequence
cggcctgaaaaacacctctgtcatgatggtggatctactcgctcacacaa

SEQ ID NO: 3686 - DNA, 50 bp, Unknown
  Description of Unknown: Universal CpG sequence
cggggcgaatggctggcaatcttactgggattacagaacaaagagcctcc

SEQ ID NO: 3687 - DNA, 50 bp, Unknown
  Description of Unknown: Universal CpG sequence
acattgatgccaactgccagagctggtacccatgccatctgctagtgacg

SEQ ID NO: 3688 - DNA, 50 bp, Unknown
  Description of Unknown: Universal CpG sequence
cgttacatggctggttgcagcctcagattaatgcgaagaccctggcgatt

SEQ ID NO: 3689 - DNA, 50 bp, Unknown
  Description of Unknown: Universal CpG sequence
cgacagttcagcacaagatcagtgacattctgtctcattagaaccacgct

SEQ ID NO: 3690 - DNA, 50 bp, Unknown
  Description of Unknown: Universal CpG sequence
ttacttttcagtccctatttggaactgctctcgcggcagttcagacctcg

SEQ ID NO: 3691 - DNA, 50 bp, Unknown
  Description of Unknown: Universal CpG sequence
aagatcaccggcctctccctcacccaggtcagcaactggttcaagaaccg

SEQ ID NO: 3692 - DNA, 50 bp, Unknown
  Description of Unknown: Universal CpG sequence
cgcaactccatcaccgtgccctacaaggtgtgggccaagttcggacacac

SEQ ID NO: 3693 - DNA, 50 bp, Unknown
  Description of Unknown: Universal CpG sequence
cggtttaattgcgccgagttttaaaaggtcctataaatgtaattggtatt

SEQ ID NO: 3694 - DNA, 50 bp, Unknown
  Description of Unknown: Universal CpG sequence
gcattttacgagttctttcctctacagctataaaactgcagcttcgatcg

SEQ ID NO: 3695 - DNA, 50 bp, Unknown
  Description of Unknown: Universal CpG sequence
cgcccttcatctaggtaggggtgggctaaggcatccttagcggatattct

SEQ ID NO: 3696 - DNA, 50 bp, Unknown
  Description of Unknown: Universal CpG sequence
cgggcaaatccctgcatcatgctgatttccagttttggaattgataccag

SEQ ID NO: 3697 - DNA, 50 bp, Unknown
  Description of Unknown: Universal CpG sequence
gcttattgtcaacctcagagaagtgtatatgtttcccttcatacatcacg

SEQ ID NO: 3698 - DNA, 50 bp, Unknown
  Description of Unknown: Universal CpG sequence
cgcttgacactcacactttgtccctgactgactatgcttgtggttctcct

SEQ ID NO: 3699 - DNA, 50 bp, Unknown
  Description of Unknown: Universal CpG sequence
atcaaattcatgtcgtaattaaagctgtcagttggaaggcaagccaatcg

SEQ ID NO: 3700 - DNA, 50 bp, Unknown
  Description of Unknown: Universal CpG sequence
ctccaaatcagacttaaggattgttttattatttaattacacaatcatcg

SEQ ID NO: 3701 - DNA, 50 bp, Unknown
  Description of Unknown: Universal CpG sequence
attgctgtcttttgtaatccatccatgcagtcgcaccagagcgattaacg

SEQ ID NO: 3702 - DNA, 50 bp, Unknown
  Description of Unknown: Universal CpG sequence
cgacatttaatagtgctaattgcactccagttaaattgccctgattgcag

SEQ ID NO: 3703 - DNA, 50 bp, Unknown
  Description of Unknown: Universal CpG sequence
cggctgccattagggaaatgggcatcattcttattgatccagcatgggct

SEQ ID NO: 3704 - DNA, 50 bp, Unknown
  Description of Unknown: Universal CpG sequence
cgcttgaatacaatttgtgtaaccttggccaagacagcctgtcattttaa

SEQ ID NO: 3705 - DNA, 50 bp, Unknown
  Description of Unknown: Universal CpG sequence
atcgcacttctggatttaatcaacttttttatccagtgttcaggatgtcg

SEQ ID NO: 3706 - DNA, 50 bp, Unknown
  Description of Unknown: Universal CpG sequence
cggggcttgagggtctcggggcccctcgctaatgtaaggttattgtaatt

SEQ ID NO: 3707 - DNA, 50 bp, Unknown
  Description of Unknown: Universal CpG sequence
ggctgcaggatgggctgtatccaaagcatcacctgcaaggcgcggatccg

SEQ ID NO: 3708 - DNA, 50 bp, Unknown
  Description of Unknown: Universal CpG sequence
cgagagggctggctcttcaaatggaccaattatatcaaaggctaccagcg

SEQ ID NO: 3709 - DNA, 50 bp, Unknown
  Description of Unknown: Universal CpG sequence
cgcatggccatgggaaaccccagtgagttctttgtggatgtgatgtgagc

SEQ ID NO: 3710 - DNA, 50 bp, Unknown
  Description of Unknown: Universal CpG sequence
cacaagtataagatactgtctggatcatatttttcaccatttggtctccg

SEQ ID NO: 3711 - DNA, 50 bp, Unknown
  Description of Unknown: Universal CpG sequence
cgggacagataaaaatgagcagcatcatattgtttgacagaatgatctcg

SEQ ID NO: 3712 - DNA, 50 bp, Unknown
  Description of Unknown: Universal CpG sequence
aagttaagttcctgcggacgctcctcttgaagaaacttttgcagccctcg

SEQ ID NO: 3713 - DNA, 50 bp, Unknown
  Description of Unknown: Universal CpG sequence
aacaaggacatattttattgtgcccatgttgtggcactgtctttataccg

SEQ ID NO: 3714 - DNA, 50 bp, Unknown
  Description of Unknown: Universal CpG sequence
ctactattgcttatttcacacttcagtaggtaaagatgcattaataatcg

SEQ ID NO: 3715 - DNA, 50 bp, Unknown
  Description of Unknown: Universal CpG sequence
tatgaagaccaatacactcatacagctagataaccaaagataacaactcg

SEQ ID NO: 3716 - DNA, 50 bp, Unknown
  Description of Unknown: Universal CpG sequence
cgcaagtgctaatcagctccattgacacacacaggctggggctacaatcc

SEQ ID NO: 3717 - DNA, 50 bp, Unknown
  Description of Unknown: Universal CpG sequence
gagctgaagtttgtttctccttccatcatttcttcctcttctaatgttcg

SEQ ID NO: 3718 - DNA, 50 bp, Unknown
  Description of Unknown: Universal CpG sequence
taagaaattcagtcacaatagagagcctagttttgaacatgtttcactcg

SEQ ID NO: 3719 - DNA, 50 bp, Unknown
  Description of Unknown: Universal CpG sequence
ctgtttacctcaagtttgaattttatctgcgcaacattagctggaatgcg

SEQ ID NO: 3720 - DNA, 50 bp, Unknown
  Description of Unknown: Universal CpG sequence
cgcagataaaattcaaacttgaggtaaacagaagaagaggaggaggagga

SEQ ID NO: 3721 - DNA, 50 bp, Unknown
  Description of Unknown: Universal CpG sequence
cggccaggcgccaagaaatcagccccaattactatattcacattgtcagt

SEQ ID NO: 3722 - DNA, 50 bp, Unknown
  Description of Unknown: Universal CpG sequence
gtcgggggctgccggagctgactccatgttttttcccaatgtagagatcg

SEQ ID NO: 3723 - DNA, 50 bp, Unknown
  Description of Unknown: Universal CpG sequence
cccaaggcgattgtcatatgatagctaagaagtggcacattaatgaagcg

SEQ ID NO: 3724 - DNA, 50 bp, Unknown
  Description of Unknown: Universal CpG sequence
acttacttttggctagcttcctcgccctcgccttggatcgcatggtgtcg

SEQ ID NO: 3725 - DNA, 50 bp, Unknown
  Description of Unknown: Universal CpG sequence
cgaagctccctgctgatcgattatttgataattgattttccccgcagcca

SEQ ID NO: 3726 - DNA, 50 bp, Unknown
  Description of Unknown: Universal CpG sequence
aaagatgacccgaagcacaaagcaactgacaaacaagtccggacaaatcg

SEQ ID NO: 3727 - DNA, 50 bp, Unknown
  Description of Unknown: Universal CpG sequence
cgactgagtcatttgttttgattacccgggtgattgccaaatgttaattt

SEQ ID NO: 3728 - DNA, 50 bp, Unknown
  Description of Unknown: Universal CpG sequence
cggcccataaactagaatagctatgaaacacaggctgcctttatgttgaa

SEQ ID NO: 3729 - DNA, 50 bp, Unknown
  Description of Unknown: Universal CpG sequence
cggagtgatagatacccataactcagagtccttaattgtacttaatttgt

SEQ ID NO: 3730 - DNA, 50 bp, Unknown
  Description of Unknown: Universal CpG sequence
ccactttgccaaattaattttgactcccataattatttgctgtaggagcg

SEQ ID NO: 3731 - DNA, 50 bp, Unknown
  Description of Unknown: Universal CpG sequence
cggagccaagtaactctattttattatatttgctgggaaatgaactagct

SEQ ID NO: 3732 - DNA, 50 bp, Unknown
  Description of Unknown: Universal CpG sequence
tgttctgcagcagggcctgtgtgagaaaacagcctttgctttctcctacg

SEQ ID NO: 3733 - DNA, 50 bp, Unknown
  Description of Unknown: Universal CpG sequence
cgcagtgacccccctggattgttattaggccggttggacattggcacctc

SEQ ID NO: 3734 - DNA, 50 bp, Unknown
  Description of Unknown: Universal CpG sequence
cttgccattgctggtcagcaataatcgaaccactttctggggattaagcg

SEQ ID NO: 3735 - DNA, 50 bp, Unknown
  Description of Unknown: Universal CpG sequence
cgggttatatattttagagaacctcattaagtgctttttaaaatgaaatt

SEQ ID NO: 3736 - DNA, 50 bp, Unknown
  Description of Unknown: Universal CpG sequence
cgccttcctcatcggctgcatgttcatcaagatgtcccagcccaagaagc

SEQ ID NO: 3737 - DNA, 50 bp, Unknown
  Description of Unknown: Universal CpG sequence
ccatgatgtcgtgaaaatgcatgttgacagcctggtccactgattgttcg

SEQ ID NO: 3738 - DNA, 50 bp, Unknown
  Description of Unknown: Universal CpG sequence
tatttacttttctcataaacaaatcagcttgggtgccgtcagagctgacg

SEQ ID NO: 3739 - DNA, 50 bp, Unknown
  Description of Unknown: Universal CpG sequence
cagctagacccgccctggtttctacctccgaaagagtcaaggctattccg

SEQ ID NO: 3740 - DNA, 50 bp, Unknown
  Description of Unknown: Universal CpG sequence
cggtgcagaacatgctatagtattgtagtcatttatgtaatgtcattgaa

SEQ ID NO: 3741 - DNA, 50 bp, Unknown
  Description of Unknown: Universal CpG sequence
cggcccggttggcacctacccaccaggatgctggcagtcctgccctcctc

SEQ ID NO: 3742 - DNA, 50 bp, Unknown
  Description of Unknown: Universal CpG sequence
aacagcagagaaataaattaagggatgcagtggccaccaccagccaagcg

SEQ ID NO: 3743 - DNA, 50 bp, Unknown
  Description of Unknown: Universal CpG sequence
cgggctctttggtaacaaaccaaccctgactttaggaaccaatacaaaca

SEQ ID NO: 3744 - DNA, 50 bp, Unknown
  Description of Unknown: Universal CpG sequence
cgggctctttcatgccccatcagaattgtaaatgaggggtctgtgggcag

SEQ ID NO: 3745 - DNA, 50 bp, Unknown
  Description of Unknown: Universal CpG sequence
cggcggctgaaattgaattgataactgcatcaacgtgccagataacgcct

SEQ ID NO: 3746 - DNA, 50 bp, Unknown
  Description of Unknown: Universal CpG sequence
cgggaatttatttgccaggaaggatgatcccatcatactgaaagagaaga

SEQ ID NO: 3747 - DNA, 50 bp, Unknown
  Description of Unknown: Universal CpG sequence
ttacaaggtccttcttccccgtaaaactttgtccaagtacctcatgtacg

SEQ ID NO: 3748 - DNA, 50 bp, Unknown
  Description of Unknown: Universal CpG sequence
tcccttccatcttgacttttgccgacgtggaaattttgggtttggagacg

SEQ ID NO: 3749 - DNA, 50 bp, Unknown
  Description of Unknown: Universal CpG sequence
cgctgtaatctctaatatgtttttttctaggtgatgctgtcagataatgg

SEQ ID NO: 3750 - DNA, 50 bp, Unknown
  Description of Unknown: Universal CpG sequence
cgccgacaaagaaatcttgcatggagactacaagtctggagtttctggga

SEQ ID NO: 3751 - DNA, 50 bp, Unknown
  Description of Unknown: Universal CpG sequence
cgtcaccgggggggtgatgtaatgcactctaaatagaatgtattgtaatc

SEQ ID NO: 3752 - DNA, 50 bp, Unknown
  Description of Unknown: Universal CpG sequence
cttcataaaccttatatgcttataaaacagcatataaaaatttaacagcg

SEQ ID NO: 3753 - DNA, 50 bp, Unknown
  Description of Unknown: Universal CpG sequence
cgcctgcaatcccacaatcagtgtgcactgtaattgtcgaatttgatgct

SEQ ID NO: 3754 - DNA, 50 bp, Unknown
  Description of Unknown: Universal CpG sequence
cgtccccccaaagacaggggacagatgtttaacatcagcctattaatccc

SEQ ID NO: 3755 - DNA, 50 bp, Unknown
  Description of Unknown: Universal CpG sequence
tccctggaatgtttttgacttcctcatcgtaattggcagcataattgacg

SEQ ID NO: 3756 - DNA, 50 bp, Unknown
  Description of Unknown: Universal CpG sequence
acccataactcattagtgttgaactcacgaggtataaagaccaacgcacg

SEQ ID NO: 3757 - DNA, 50 bp, Unknown
  Description of Unknown: Universal CpG sequence
cgccctgaaatctatttaaagagagggaaaggggaggagaacaaaggggg

SEQ ID NO: 3758 - DNA, 50 bp, Unknown
  Description of Unknown: Universal CpG sequence
cgggctggtggcacctgtccttgtgtctcgtggtatttactgtgctacct

SEQ ID NO: 3759 - DNA, 50 bp, Unknown
  Description of Unknown: Universal CpG sequence
cggggctgttgagactttctggcatggtggtcatggtcatctcttctcgc

SEQ ID NO: 3760 - DNA, 50 bp, Unknown
  Description of Unknown: Universal CpG sequence
cggcctatttggtatggtctttttattggaaaatgacaaaggggttatag

SEQ ID NO: 3761 - DNA, 50 bp, Unknown
  Description of Unknown: Universal CpG sequence
cgtaatggatgagatatttacagcaaagctgttaaaacattgaataaaat

SEQ ID NO: 3762 - DNA, 50 bp, Unknown
  Description of Unknown: Universal CpG sequence
cgctgcatcttctgcatgtgccacttttgggaggacgtttgaaacttact

SEQ ID NO: 3763 - DNA, 50 bp, Unknown
  Description of Unknown: Universal CpG sequence
cgactcccttgataaatgggacttccagaccacactttattgagtctctg

SEQ ID NO: 3764 - DNA, 50 bp, Unknown
  Description of Unknown: Universal CpG sequence
cgtgtagaagcgagtctgctcaacagcttgttatttggtggattgtggca

SEQ ID NO: 3765 - DNA, 50 bp, Unknown
  Description of Unknown: Universal CpG sequence
cgacacgctcagctgcatcttgttaaaagcttcctgcgggttggcagaat

SEQ ID NO: 3766 - DNA, 50 bp, Unknown
  Description of Unknown: Universal CpG sequence
aaccccttatttacattttgcggttattttgagcctttgccatctgttcg

SEQ ID NO: 3767 - DNA, 50 bp, Unknown
  Description of Unknown: Universal CpG sequence
cgcccgaaagcccaacaagaaaatttgtaggaaaggaggtaggtagcgag

SEQ ID NO: 3768 - DNA, 50 bp, Unknown
  Description of Unknown: Universal CpG sequence
cgcagacgatctctcgcacactcctctccggagacagaagtatttgtttg

SEQ ID NO: 3769 - DNA, 50 bp, Unknown
  Description of Unknown: Universal CpG sequence
gaagattaaattaagtatcatatctgctgaccctattgccatggttaccg

SEQ ID NO: 3770 - DNA, 50 bp, Unknown
  Description of Unknown: Universal CpG sequence
cgcccttgtctagactggagacgacacctcctctgtgtgtaaacagaggc

SEQ ID NO: 3771 - DNA, 50 bp, Unknown
  Description of Unknown: Universal CpG sequence
cgtggggccagggcttcctgggttcagctaccagccgagactctgagtca

SEQ ID NO: 3772 - DNA, 50 bp, Unknown
  Description of Unknown: Universal CpG sequence
cgagccatgatagagaacttcaatgccaaatatgtctccctgcatgtcag

SEQ ID NO: 3773 - DNA, 50 bp, Unknown
  Description of Unknown: Universal CpG sequence
actgctttgacccagaagcctgggatatgctggatgatgaggtctctgcg

SEQ ID NO: 3774 - DNA, 50 bp, Unknown
  Description of Unknown: Universal CpG sequence
acccacagatacaatgggtaccttgaactcgctcaattgatgcaggcccg

SEQ ID NO: 3775 - DNA, 50 bp, Unknown
  Description of Unknown: Universal CpG sequence
ttaactcctccttctgttgtcagaagaatgttattccccttcacatcacg

SEQ ID NO: 3776 - DNA, 50 bp, Unknown
  Description of Unknown: Universal CpG sequence
aggaatttactgcaattccttgcggattttgcacatacagctcgcaagcg

SEQ ID NO: 3777 - DNA, 50 bp, Unknown
  Description of Unknown: Universal CpG sequence
atctattgttgcacttcataatgagaaggcagatttactgccttttaccg

SEQ ID NO: 3778 - DNA, 50 bp, Unknown
  Description of Unknown: Universal CpG sequence
tcccctaatcaggatggagacgcagttcattacaagctggtgaggcaacg

SEQ ID NO: 3779 - DNA, 50 bp, Unknown
  Description of Unknown: Universal CpG sequence
tgccagcagtcttgggatagtgctgaggtgcacccctacttcctcctccg

SEQ ID NO: 3780 - DNA, 50 bp, Unknown
  Description of Unknown: Universal CpG sequence
tcctataatgattacctgcgggcggctcagatgcactctggctaccagcg

SEQ ID NO: 3781 - DNA, 50 bp, Unknown
  Description of Unknown: Universal CpG sequence
caagcagtgtgaccaaaagaaaatattccaaagcttgtcacgtatgaccg

SEQ ID NO: 3782 - DNA, 50 bp, Unknown
  Description of Unknown: Universal CpG sequence
cggccgccagcccaattggcagctctccatcgccaccagtcaatggtggc

SEQ ID NO: 3783 - DNA, 50 bp, Unknown
  Description of Unknown: Universal CpG sequence
cgggtaattggatttatctggttttagaatttgttaggttctgttgcaaa

SEQ ID NO: 3784 - DNA, 50 bp, Unknown
  Description of Unknown: Universal CpG sequence
taaacaggcacctccgtccctgacctactttctgccttccctaaatgtcg

SEQ ID NO: 3785 - DNA, 50 bp, Unknown
  Description of Unknown: Universal CpG sequence
cggtgttattgtgatttaaatccaagctctataaaagagagcagttcttt

SEQ ID NO: 3786 - DNA, 50 bp, Unknown
  Description of Unknown: Universal CpG sequence
cgctgtgagcctcaacaccacaggctgcagtgctctgcgacagaaaaaca

SEQ ID NO: 3787 - DNA, 50 bp, Unknown
  Description of Unknown: Universal CpG sequence
gatgcagcgatgggctgcactgccagcattgttctgcttcaagcttttcg

SEQ ID NO: 3788 - DNA, 50 bp, Unknown
  Description of Unknown: Universal CpG sequence
cgctttccacacgtggcaaatgattgcctcggtaaaggtattttctgttt

SEQ ID NO: 3789 - DNA, 50 bp, Unknown
  Description of Unknown: Universal CpG sequence
aaacatgtgttttcaggattttcttttcacatgccacacaaaaagtaacg

SEQ ID NO: 3790 - DNA, 50 bp, Unknown
  Description of Unknown: Universal CpG sequence
cgccctgctggaaaagaagaaactcatggccgctagggagcgcaaagcca

SEQ ID NO: 3791 - DNA, 50 bp, Unknown
  Description of Unknown: Universal CpG sequence
cgacttttgttttaataacaaagttgttgattttctactaagggttcttt

SEQ ID NO: 3792 - DNA, 50 bp, Unknown
  Description of Unknown: Universal CpG sequence
cgctgggaaatagatgttctgtctctatgacaatatattttaactgactt

SEQ ID NO: 3793 - DNA, 50 bp, Unknown
  Description of Unknown: Universal CpG sequence
tcctggaaggctgtctgacatcaccccgtttcttgtcggctgatgtttcg

SEQ ID NO: 3794 - DNA, 50 bp, Unknown
  Description of Unknown: Universal CpG sequence
cggcagggtgtggaacctcgacatgacccccagctgttctttgtaaggga

SEQ ID NO: 3795 - DNA, 50 bp, Unknown
  Description of Unknown: Universal CpG sequence
cgggcgatgttaacatctcattatctttgttactgtaattacattatccg

SEQ ID NO: 3796 - DNA, 50 bp, Unknown
  Description of Unknown: Universal CpG sequence
cgggttaggaggcaagcacattacagctccattttacctctgcaggcatc

SEQ ID NO: 3797 - DNA, 50 bp, Unknown
  Description of Unknown: Universal CpG sequence
caaaggctaatttggttaccctccggatccacaatagcgaaactgtgtcg

SEQ ID NO: 3798 - DNA, 50 bp, Unknown
  Description of Unknown: Universal CpG sequence
gagaggtccagactggctaaatcgttgctttggttcaagcaaggcactcg

SEQ ID NO: 3799 - DNA, 50 bp, Unknown
  Description of Unknown: Universal CpG sequence
ggtcgtggtaatttacatcctctctgtgtacattaacttatctgcagccg

SEQ ID NO: 3800 - DNA, 50 bp, Unknown
  Description of Unknown: Universal CpG sequence
cgacttggtcgagtagttgatgaatggctactcgacaaaggtaaaaaaca

SEQ ID NO: 3801 - DNA, 50 bp, Unknown
  Description of Unknown: Universal CpG sequence
ggaacaccataaacgggctaaacgatgaaattaacaagccatctgaggcg

SEQ ID NO: 3802 - DNA, 50 bp, Unknown
  Description of Unknown: Universal CpG sequence
cgtctttgtttgaaggtcttggcaaactgctcaagctcctcaaggtcact

SEQ ID NO: 3803 - DNA, 50 bp, Unknown
  Description of Unknown: Universal CpG sequence
cgctgattggctgcctgtttggatacatctttaggggagccttgaaactg

SEQ ID NO: 3804 - DNA, 50 bp, Unknown
  Description of Unknown: Universal CpG sequence
gaaggcacaatttccagcaacacaataaaatgtgcagtgaatttatggcg

SEQ ID NO: 3805 - DNA, 50 bp, Unknown
  Description of Unknown: Universal CpG sequence
cggctgcagtgcaccaactatcttggagtgaatctgagccccaagctggc

SEQ ID NO: 3806 - DNA, 50 bp, Unknown
  Description of Unknown: Universal CpG sequence
cgaccatgaaaggattcagcgtcttgaatgagacagctgcttgtacagag

SEQ ID NO: 3807 - DNA, 50 bp, Unknown
  Description of Unknown: Universal CpG sequence
cggcctttgggattgtcaagcttagtcaagtctctttgcagccgtgagtt

SEQ ID NO: 3808 - DNA, 50 bp, Unknown
  Description of Unknown: Universal CpG sequence
ggaacactgagacctgttgccaatttgagtgaatatagtgactgtactcg

SEQ ID NO: 3809 - DNA, 50 bp, Unknown
  Description of Unknown: Universal CpG sequence
ggcctcgcagattttgatcttaagaaggccattgaacactaccatggtcg

SEQ ID NO: 3810 - DNA, 50 bp, Unknown
  Description of Unknown: Universal CpG sequence
cgtgaagacttaattgccttatggacatggaaagaatggaggggcttctc

SEQ ID NO: 3811 - DNA, 50 bp, Unknown
  Description of Unknown: Universal CpG sequence
cgcagacatagccatagtcgtaacctggggacagcatttaaatacagacg

SEQ ID NO: 3812 - DNA, 50 bp, Unknown
  Description of Unknown: Universal CpG sequence
cgacaagatgatattaaagatgaatcttcggagttttcaagccattcaag

SEQ ID NO: 3813 - DNA, 50 bp, Unknown
  Description of Unknown: Universal CpG sequence
gctgtttgatcgaggtgttcaaatgcttttaaccaccgttggtgctttcg

SEQ ID NO: 3814 - DNA, 50 bp, Unknown
  Description of Unknown: Universal CpG sequence
agatggacgacagccattgctcgtcctccatgaaattgccgggggtctcg

SEQ ID NO: 3815 - DNA, 50 bp, Unknown
  Description of Unknown: Universal CpG sequence
tccacctttgtaacccctggtttcctcttttcctgaatcacaaatttacg

SEQ ID NO: 3816 - DNA, 50 bp, Unknown
  Description of Unknown: Universal CpG sequence
cggatgggaactgtcagagcctgccatctgtgacagcgcttggcatattc

SEQ ID NO: 3817 - DNA, 50 bp, Unknown
  Description of Unknown: Universal CpG sequence
gggccgctgctggataatttgcagtttaatcagcgtttgtaatgagagcg

SEQ ID NO: 3818 - DNA, 50 bp, Unknown
  Description of Unknown: Universal CpG sequence
ttcacaagccagcagttgcaagagctagaggccacgttccagaggaaccg

SEQ ID NO: 3819 - DNA, 50 bp, Unknown
  Description of Unknown: Universal CpG sequence
cgtgtgaaaatgaacaaacgcaagcgtagcacagttaatgaaaagccaaa

SEQ ID NO: 3820 - DNA, 50 bp, Unknown
  Description of Unknown: Universal CpG sequence
gggcttcagatattttgcacgaattttaaaacatggcaataaatggctcg

SEQ ID NO: 3821 - DNA, 50 bp, Unknown
  Description of Unknown: Universal CpG sequence
cggctaaagtctctccaaggtgacaagctggaagtcagcttggtaagtgt

SEQ ID NO: 3822 - DNA, 50 bp, Unknown
  Description of Unknown: Universal CpG sequence
ttaaaaaaatcaactaaaccatgcttttcagaacagaagattcattatcg

SEQ ID NO: 3823 - DNA, 50 bp, Unknown
  Description of Unknown: Universal CpG sequence
cgtcatcaggcctggcagagctcattggcagagaagttaagagttttatt

SEQ ID NO: 3824 - DNA, 50 bp, Unknown
  Description of Unknown: Universal CpG sequence
cgtgcagtttgcttcaaaggagatagcagaaaatgctctggggaaacaca

SEQ ID NO: 3825 - DNA, 50 bp, Unknown
  Description of Unknown: Universal CpG sequence
ctttaatgaaaactgcaagcaccaaagggtaaccatttatttatgagtcg

SEQ ID NO: 3826 - DNA, 50 bp, Unknown
  Description of Unknown: Universal CpG sequence
cggcacatttaacatggttaaagcaggggaaaatagtcattaagttaatg

SEQ ID NO: 3827 - DNA, 50 bp, Unknown
  Description of Unknown: Universal CpG sequence
cggtatatactagcctgcaatgaagaaagaacgagacccacatcatcagc

SEQ ID NO: 3828 - DNA, 50 bp, Unknown
  Description of Unknown: Universal CpG sequence
caatctcgcggtgactgattaagccctgtttagaactaattgctctttcg

SEQ ID NO: 3829 - DNA, 50 bp, Unknown
  Description of Unknown: Universal CpG sequence
cgtcgatacaatcaccaatgagtcgatccacaggtaccgggaacatagaa

SEQ ID NO: 3830 - DNA, 50 bp, Unknown
  Description of Unknown: Universal CpG sequence
tagctccctaattaactgtctcaaatatataattacattgcatctttacg

SEQ ID NO: 3831 - DNA, 50 bp, Unknown
  Description of Unknown: Universal CpG sequence
atggtggcgtacgcccttgtaatgatcagctctggtcgatgtgcttaccg

SEQ ID NO: 3832 - DNA, 50 bp, Unknown
  Description of Unknown: Universal CpG sequence
cggcactgctatttataactcatctcaaattgagggcagactgcctaaaa

SEQ ID NO: 3833 - DNA, 50 bp, Unknown
  Description of Unknown: Universal CpG sequence
cgcgaactgtgcaagcaaagccccacatggctttatcaggagtgttgtgt

SEQ ID NO: 3834 - DNA, 50 bp, Unknown
  Description of Unknown: Universal CpG sequence
gaggtattcatactgggctgatacccagggtttggagtcatggaattccg

SEQ ID NO: 3835 - DNA, 50 bp, Unknown
  Description of Unknown: Universal CpG sequence
gttagcattttacgagttctttcctctacagctataaaactgcagcttcg

SEQ ID NO: 3836 - DNA, 50 bp, Unknown
  Description of Unknown: Universal CpG sequence
cgggaacgcttacagagagagagagagcgcctagaaattgaaaggcaaaa

SEQ ID NO: 3837 - DNA, 50 bp, Unknown
  Description of Unknown: Universal CpG sequence
cggatactcaacagtccactatcggagagggctgtcagataaatcttgtg

SEQ ID NO: 3838 - DNA, 50 bp, Unknown
  Description of Unknown: Universal CpG sequence
tacccggaagagaacccttggccttctcagctgggagctgggagcacacg

SEQ ID NO: 3839 - DNA, 50 bp, Unknown
  Description of Unknown: Universal CpG sequence
gaacaaacatataaatatatctctgcattcctgcctccctcataaaagcg

SEQ ID NO: 3840 - DNA, 50 bp, Unknown
  Description of Unknown: Universal CpG sequence
tgtagtgctgcggtttctcgggctgtgcctgcagcacctgagcggtagcg

SEQ ID NO: 3841 - DNA, 50 bp, Unknown
  Description of Unknown: Universal CpG sequence
aggacatcattgatggatttgccatgaccagctttgtcacttttgaagcg

SEQ ID NO: 3842 - DNA, 50 bp, Unknown
  Description of Unknown: Universal CpG sequence
atcttcctaatttttcatctctttaacaaactcctatgaagttgaaaccg

SEQ ID NO: 3843 - DNA, 50 bp, Unknown
  Description of Unknown: Universal CpG sequence
ttccttttgcctcgtgcaatccgtaattgaaatggaaaatcaaatgaacg

SEQ ID NO: 3844 - DNA, 50 bp, Unknown
  Description of Unknown: Universal CpG sequence
cgcttagcagctattatgtcgactcgatcataagtcacgagagtgaggac

SEQ ID NO: 3845 - DNA, 50 bp, Unknown
  Description of Unknown: Universal CpG sequence
cgcctctgctggaacaagcaggaccctaactacctggccaccatggccat

SEQ ID NO: 3846 - DNA, 50 bp, Unknown
  Description of Unknown: Universal CpG sequence
cgatgttgaattttaaaatcatgtggattatggcggatggggcctgacaa

SEQ ID NO: 3847 - DNA, 50 bp, Unknown
  Description of Unknown: Universal CpG sequence
aacaattattattataattttaaacaacctggtattttccattactaacg

SEQ ID NO: 3848 - DNA, 50 bp, Unknown
  Description of Unknown: Universal CpG sequence
cggcaggtttagtggcatggcaaacaatgcctaactcaggcaagtgtaac

SEQ ID NO: 3849 - DNA, 50 bp, Unknown
  Description of Unknown: Universal CpG sequence
agctgctctcggcacaagcatgtacggcaaaggcaagagtaacagcagcg

SEQ ID NO: 3850 - DNA, 50 bp, Unknown
  Description of Unknown: Universal CpG sequence
cgcagatagctgggttgcttgatttgaatttgaggagttgaaaagcctgt

SEQ ID NO: 3851 - DNA, 50 bp, Unknown
  Description of Unknown: Universal CpG sequence
tctttctctcctgtgactttggtgaagtctctcaccactcagtgttgtcg

SEQ ID NO: 3852 - DNA, 50 bp, Unknown
  Description of Unknown: Universal CpG sequence
agcaattcatccccgatctcatcacaaagtaacagcgaccatcctgctcg

SEQ ID NO: 3853 - DNA, 50 bp, Unknown
  Description of Unknown: Universal CpG sequence
cgtatagttgtacactggacaaatctcctgcagagcaacaagatttccta

SEQ ID NO: 3854 - DNA, 50 bp, Unknown
  Description of Unknown: Universal CpG sequence
ggcctggggaatagaaacccaaatccacttgtaatcgtacaagagattcg

SEQ ID NO: 3855 - DNA, 50 bp, Unknown
  Description of Unknown: Universal CpG sequence
cttttacaaactagttgttttgtcagcatgagtgtgacaacaattagacg

SEQ ID NO: 3856 - DNA, 50 bp, Unknown
  Description of Unknown: Universal CpG sequence
cgagaaactggacaaccaacggctcaagaatttcaagaacaaaggccgcg

SEQ ID NO: 3857 - DNA, 50 bp, Unknown
  Description of Unknown: Universal CpG sequence
cgccagattagccccatccatccagtgtcaatggttgtcttgttgagaaa

SEQ ID NO: 3858 - DNA, 50 bp, Unknown
  Description of Unknown: Universal CpG sequence
cgtggggtggttcctatttctgtcggcaaatacaaatttttcactcagca

SEQ ID NO: 3859 - DNA, 50 bp, Unknown
  Description of Unknown: Universal CpG sequence
cggcactcagtacattaattcacgctgaagtccggtaaatcaaaattata

SEQ ID NO: 3860 - DNA, 50 bp, Unknown
  Description of Unknown: Universal CpG sequence
cattgtccaagtggagtgccatttcttctgatatgaaagtgttcaaatcg

SEQ ID NO: 3861 - DNA, 50 bp, Unknown
  Description of Unknown: Universal CpG sequence
ttcttagccccgctcccatgtgaggcctaaacaaagactttggggagacg

SEQ ID NO: 3862 - DNA, 50 bp, Unknown
  Description of Unknown: Universal CpG sequence
cgtcgttggctaggttttggatttattactttcgaggacgaacaatcagt

SEQ ID NO: 3863 - DNA, 50 bp, Unknown
  Description of Unknown: Universal CpG sequence
cgagacattcagtgctttttaaattggaagttgcattgtgctaaagacct

SEQ ID NO: 3864 - DNA, 50 bp, Unknown
  Description of Unknown: Universal CpG sequence
gcattttagctaaactaagacttgccctgcatggtgccagctgtagcacg

SEQ ID NO: 3865 - DNA, 50 bp, Unknown
  Description of Unknown: Universal CpG sequence
attaatggcttttctcagcggaattgtaaattcaaatgtcacctcacacg

SEQ ID NO: 3866 - DNA, 50 bp, Unknown
  Description of Unknown: Universal CpG sequence
ctatctcttgttctgaatagaaccaattttcagagagctatgaaatcacg

SEQ ID NO: 3867 - DNA, 50 bp, Unknown
  Description of Unknown: Universal CpG sequence
cggagagcagggaaggctaaagccggagcctaattcatgatgcatgaacg

SEQ ID NO: 3868 - DNA, 50 bp, Unknown
  Description of Unknown: Universal CpG sequence
gtttgtcatcgtaccaatgcatgcaaagcattccactcccagaaacaacg

SEQ ID NO: 3869 - DNA, 50 bp, Unknown
  Description of Unknown: Universal CpG sequence
cggcacattaggcagtgcgcttattttgggctccgcttcagtggattaac

SEQ ID NO: 3870 - DNA, 50 bp, Unknown
  Description of Unknown: Universal CpG sequence
tgaggccagacagtagaggcaggttatagatcacagcacatggagaagcg

SEQ ID NO: 3871 - DNA, 50 bp, Unknown
  Description of Unknown: Universal CpG sequence
ttgactcctttcagttgataattcatggcttgcatatgcgctttaatgcg

SEQ ID NO: 3872 - DNA, 50 bp, Unknown
  Description of Unknown: Universal CpG sequence
acacacagcaggaaggcaaacatcagcttgtgcttctcaaagaggctgcg

SEQ ID NO: 3873 - DNA, 50 bp, Unknown
  Description of Unknown: Universal CpG sequence
cggaaattgcatagtagacctcgtaaactttataaacattcaaggtaggt

SEQ ID NO: 3874 - DNA, 50 bp, Unknown
  Description of Unknown: Universal CpG sequence
cggggtgcaccgagctgtcgggttaaacaaacaacttgtaccctgaccaa

SEQ ID NO: 3875 - DNA, 50 bp, Unknown
  Description of Unknown: Universal CpG sequence
gctacagtaagttattccaatttttttttaacatttttcctgactttccg

SEQ ID NO: 3876 - DNA, 50 bp, Unknown
  Description of Unknown: Universal CpG sequence
cggcttcatcctgcgccagttcaacgcctgcccctgggactactcccagt

SEQ ID NO: 3877 - DNA, 50 bp, Unknown
  Description of Unknown: Universal CpG sequence
cgcccttcgcaggaaggacgtctgcgcactaagatactcagttccaagtt

SEQ ID NO: 3878 - DNA, 50 bp, Unknown
  Description of Unknown: Universal CpG sequence
cgaaagttaagtcttcgtggatgtcttggagtgggagacaatgcattaag

SEQ ID NO: 3879 - DNA, 50 bp, Unknown
  Description of Unknown: Universal CpG sequence
ctctaattctgtaatatatcaaggaatctcgtaaaaccgacactaaaacg

SEQ ID NO: 3880 - DNA, 50 bp, Unknown
  Description of Unknown: Universal CpG sequence
cgtgtttggaattgttgtgcacaaacatgttgtctgacacggccagcacg
